(19) United States
(12) Patent Application Publication
(10) Pub. No.: US 2025/0122487 A1
(43) Pub. Date: Apr. 17, 2025

(54) ENGINEERED ACETATE KINASE VARIANTS

(71) Applicant: Codexis, Inc., Redwood City, CA (US)

(72) Inventors: Stephanie Marie Forget, Redwood City, CA (US); Marissa Greene MacAvoy, San Francisco, CA (US); Simon Ng, San Francisco, CA (US); Nicholas Porter, Redwood City, CA (US); Jonathan Vroom, San Mateo, CA (US)

(21) Appl. No.: 18/913,845

(22) Filed: Oct. 11, 2024

Related U.S. Application Data
(60) Provisional application No. 63/589,839, filed on Oct. 12, 2023.
(60) Provisional application No. 63/661,402, filed on Jun. 18, 2024.

(51) Int. Cl. C12N 9/12; C12N 11/00; C12P 19/38

(52) U.S. Cl. CPC C12N 9/1217; C12N 11/00; C12P 19/38; C12Y 207/02001

(57) ABSTRACT

The present disclosure relates to engineered acetate kinase enzymes and compositions thereof, recombinant polynucleotides encoding the engineered acetate kinase enzymes, and method of using the engineered acetate kinase enzymes.

### CROSS-REFERENCE TO SEQUENCE LISTING, TABLE OR COMPUTER PROGRAM

[0001] This application claims the benefit of U.S. Provisional Application No. 63/589,839, filed Oct. 12, 2023, and U.S. Provisional Application No. 63/661,402, filed Jun. 18, 2024, the entire contents of each of which are incorporated herein in their entireties.

### REFERENCE TO SEQUENCE LISTING, TABLE OR COMPUTER PROGRAM

[0002] The Sequence Listing concurrently submitted herewith as file name CX10-259US3_ST26.xml, created on Oct. 11, 2024, with a file size of 2,936,284 bytes, is part of the specification and is hereby incorporated by reference herein in its entirety.

### TECHNICAL FIELD

[0003] The present disclosure relates to engineered acetate kinase variants, polynucleotides encoding the engineered acetate kinase variants, and uses of the engineered enzymes.

### BACKGROUND

[0004] Acetate kinase catalyzes the transfer of the γ-phosphoryl group of NTP to convert acetate to acetyl phosphate. In the reverse reaction, acetate kinase catalyzes the conversion of nucleoside-diphosphate (NDP) to the corresponding nucleoside-triphosphate (NTP) in presence of a phosphate donor, such as acetyl phosphate and pyrophosphate. Acetate kinase is widespread in both anaerobic and aerobic microbes of the Bacteria and Archaea domains.

[0005] Acetate kinase is used in assays for acetic acid, particularly in foods. One type of assay uses pyruvate kinase and phosphoenolpyruvate (PEP) to convert product ADP from the acetate kinase ATP reaction to pyruvate, which is then converted in presence of cofactor NADH to lactate and NAD. Acetate kinase is also used in ATP regeneration systems, converting ADP to ATP.

[0006] Acetate kinase from E. coli and Bacillus stearothermophilus are available commercially. Desirable are acetate kinase enzymes that function effectively in the production of NTPs, including modified NTPs, and have advantageous properties, e.g., expression in soluble form, increased activity, and increased stability.

### SUMMARY

[0007] The present disclosure provides engineered acetate kinases and uses of the engineered acetate kinases for chemical conversions, for example conversion of nucleoside diphosphate to nucleoside triphosphates. In some embodiments, the acetate kinase is engineered to have an improved property.

[0008] In one aspect, the present disclosure provides an engineered acetate kinase comprising an amino acid sequence having at least 70%, 75%, 80%, 81%, 82%, 83%, 84%, 85%, 86%, 87%, 88%, 89%, 90%, 91%, 92%, 93%, 94%, 95%, 96%, 97%, 98%, 99%, or more sequence identity to a reference sequence corresponding to amino acid residues 12-417 of an even-numbered SEQ ID NO. of SEQ ID NOs: 4, 14-566, 612-868, 894-924, and 940-1390, or to a reference sequence corresponding to an even-numbered SEQ ID NO. of SEQ ID NOs: 4, 14-566, 612-868, 894-924, and 940-1390, or to a reference sequence corresponding to an even-numbered SEQ ID NO. of SEQ ID NOs: 4, 14-566, 612-868, 894-924, and 940-1390, or to a reference sequence corresponding to an even-numbered SEQ ID NO. of SEQ ID NOs: 4, 14-566, 612-868, 894-924, and 940-1390, wherein the amino acid sequence comprises one or more substitutions relative to the reference sequence corresponding to amino acid residues 12-417 of SEQ ID NO: 4, 254, 396, 620, 846, 1240, or 1250, or relative to the reference sequence corresponding to SEQ ID NO: 4, 254, 396, 620, 846, 1240, or 1250.

[0009] In some embodiments, the engineered acetate kinase comprises an amino acid sequence having at least 70%, 75%, 80%, 81%, 82%, 83%, 84%, 85%, 86%, 87%, 88%, 89%, 90%, 91%, 92%, 93%, 94%, 95%, 96%, 97%, 98%, 99%, or more sequence identity to a reference sequence corresponding to amino acid residues 12-417 of SEQ ID NO: 4, 254, 396, 620, 846, 1240, or 1250, or to a reference sequence corresponding to SEQ ID NO: 4, 254, 396, 620, 846, 1240, or 1250, wherein the amino acid sequence comprises one or more substitutions relative to the reference sequence corresponding to amino acid residues 12-417 of SEQ ID NO: 4, 254, 396, 620, 846, 1240, or 1250, or relative to the reference sequence corresponding to SEQ ID NO: 4, 254, 396, 620, 846, 1240, or 1250.

[0010] In some embodiments, the engineered acetate kinase comprises an amino acid sequence having at least 70%, 75%, 80%, 81%, 82%, 83%, 84%, 85%, 86%, 87%, 88%, 89%, 90%, 91%, 92%, 93%, 94%, 95%, 96%, 97%, 98%, 99%, or more sequence identity to the reference sequence corresponding to amino acid residues 12-417 of SEQ ID NO: 4, or to the reference sequence corresponding to SEQ ID NO: 4, wherein the amino acid sequence comprises one or more substitutions relative to the reference sequence corresponding to amino acid residues 12-417 of SEQ ID NO: 4, or relative to the reference sequence corresponding to SEQ ID NO: 4.

[0011] In some embodiments, the engineered acetate kinase comprises an amino acid sequence having at least 70%, 75%, 80%, 81%, 82%, 83%, 84%, 85%, 86%, 87%, 88%, 89%, 90%, 91%, 92%, 93%, 94%, 95%, 96%, 97%, 98%, 99%, or more sequence identity to the reference sequence corresponding to amino acid residues 12-417 of SEQ ID NO: 254, 396, 620, 846, 1240, or 1250, or to the reference sequence corresponding to SEQ ID NO: 254, 396, 620, 846, 1240, or 1250, wherein the amino acid sequence comprises one or more substitutions relative to the reference sequence corresponding to amino acid residues 12-417 of SEQ ID NO: 4, or relative to the reference sequence corresponding to SEQ ID NO: 4.

[0012] In some embodiments, the engineered acetate kinase comprises an amino acid sequence having at least 70%, 75%, 80%, 81%, 82%, 83%, 84%, 85%, 86%, 87%, 88%, 89%, 90%, 91%, 92%, 93%, 94%, 95%, 96%, 97%, 98%, 99%, or more sequence identity to a reference sequence corresponding to amino acid residues 12-417 of an even-numbered SEQ ID NO. of SEQ ID NOs: 14-566, 612-868, 894-924, and 940-1390, or to a reference sequence corresponding to an even-numbered SEQ ID NO. of SEQ ID NOs: 14-566, 612-868, 894-924, and 940-1390, wherein the amino acid sequence comprises one or more substitutions relative to the reference sequence corresponding to amino acid residues 12-417 of SEQ ID NO: 4, or relative to the reference sequence corresponding to SEQ ID NO: 4.

[0013] In some embodiments, the amino acid sequence of the engineered acetate kinase comprises at least a substitution at amino acid position 4, 5, 10, 11, 13, 14, 15, 16, 18, 19, 22, 26, 27, 28, 30, 31, 32, 36, 38, 41, 43, 46, 49, 50, 52, 54, 55, 60, 61, 62, 63, 64, 65, 66, 68, 69, 72, 74, 75, 76, 77, 79, 80, 87, 88, 91, 97, 98, 107, 113, 114, 110, 115, 116, 117, 118, 119, 120, 121, 123, 126, 127, 128, 130, 133, 134, 135, 136, 137, 138, 139, 141, 142, 143, 144, 145, 146, 147, 148, 149, 150, 151, 152, 156, 157, 160, 163, 165, 167, 170, 176, 180, 182, 183, 189, 190, 192, 196, 199, 201, 204, 205, 207, 208, 209, 210, 211, 212, 213, 216, 217, 223, 225, 227, 229, 231, 238, 240, 242, 246, 248, 249, 251, 257, 258, 260, 261, 263, 264, 265, 266, 268, 269, 270, 273, 276, 277, 279, 280, 284, 285, 288, 291, 292, 293, 295, 297, 298, 299, 300, 301, 302, 303, 304, 306, 308, 309, 310, 311, 312, 313, 314, 315, 316, 317, 318, 320, 323, 324, 329, 339, 340, 343, 344, 345, 347, 348, 349, 350, 352, 353, 354, 355, 356, 358, 360, 361, 363, 364, 369, 370, 372, 373, 374, 375, 376, 383, 384, 385, 387, 390, 391, 392, 393, 394, 395, 398, 400, 402, 404, 405, 406, 407, 408, or 409, or combinations thereof, wherein the amino acid positions are relative to the reference sequence corresponding to amino acid residues 12-417 of SEQ ID NO: 4, or relative to the reference sequence corresponding to SEQ ID NO: 4.

[0014] In some embodiments, the amino acid sequence of the engineered acetate kinase comprises at least a substitution at amino acid position 32, 54, 88, 147, 209, 277, 279, 293, 299, 313, or 344, or combinations thereof, wherein the amino acid positions are relative to the reference sequence corresponding to amino acid residues 12-417 of SEQ ID NO: 4, or relative to the reference sequence corresponding to SEQ ID NO: 4.

[0015] In some embodiments, the amino acid sequence of the engineered acetate kinase comprises at least a substitution or substitution set at amino acid position(s) 98, 404, 137/144, 77, 75, 115, 136, 147, 147/308, 15, 141, 146, 120/135, 160, 217, 135, 148, 301, 130, 11/50, 156, 16, 144/145, 348, 144, 26, 66, 138, 49, 157, 196, 270, 170, 142, 41/97, 369, 74, 52, 352, 373, 27, 280, 137, 126, 285, 19, 46, 276, 145, 205, 313, 348, 372, 69, 68, 392, 72, 50, 69/148/348/372/392, 52/69/148/348/392, 52/148/348/372, 147/205/313/373/408, 69/148/348/392, 52/348/372, 69/148/348, 52/136/348/372, 148/348, 348/372/392, 52/348/392, 136/348, 348/372, 69/136/348, 136/313/352/373/408, 147/313/352/408, 52/148/348, 148/348/372, 52/136/348, 52/69/348/372/392, 348/392, 147/313, 69/148/372/392, 136/148/348/392, 136/372, 69/348/392, 147/205, 69/136/372/392, 69/136/372, 147/205/352, 148/372, 52/69/348/372, 52/69/348, 136/373, 68/136/313/408, 136/205/313/352/408, 147/352/408, 52/148/372, 205/313/352, 313/352/408, 143/313/408, 136/352/373, 147/352, 68/313, 136/205/408, 68/136/408, 313/408, 69/148, 52/372/392, 148/392, 5/52/69/372/392, 136/348/392, 136/313/352, 136/313, 52/148, 372/392, 52/69/372, 136/205/313, 205/208/313, 136/352/408, 205/313, 52/136, 313/352, 136/148/348, 136/408, 136/392, 68/136, 136/205, 69/136, 52/136/372/392, 52/148/392, 68/136/205/352, 205/352/373/408, 69/392, 136/205/352, 205/408, 205/352/408, 408, 52/69, 52/69/392, 69/136/348/372, 69/136/148/392, 68/352/373/408, 68/352, 52/392, 136/147/205/373/408, or 205/352, wherein the amino acid positions are relative to the reference sequence corresponding to amino acid residues 12-417 of SEQ ID NO: 4, or relative to the reference sequence corresponding to SEQ ID NO: 4.

[0016] In some embodiments, the amino acid sequence of the engineered acetate kinase comprises at least one substitution as set forth in Tables 7.2, 8.2, 9.2, 10.2, 11.2, 12.2, 14.2, 15.2, 16.2, 17.2, 19.2, 22.2, 23.2, 24.2, 25.2, 26.2, 27.2, or 28.2, wherein the amino acid positions are relative to the reference sequence corresponding to amino acid residues 12-417 of SEQ ID NO: 4, or relative to the reference sequence corresponding to SEQ ID NO: 4.

[0017] In some embodiments, the amino acid sequence of the engineered acetate kinase comprises at least a substitution or substitution set of an engineered acetate kinase variant set forth in Tables 7.2, 8.2, 9.2, 10.2, 11.2, 12.2, 14.2, 15.2, 16.2, 17.2, 19.2, 22.2, 23.2, 24.2, 25.2, 26.2, 27.2, or 28.2, wherein the amino acid positions are relative to the reference sequence corresponding to amino acid residues 12-417 of SEQ ID NO: 4, or relative to the reference sequence corresponding to SEQ ID NO: 4.

[0018] In some embodiments, the engineered acetate kinase comprises an amino acid sequence having at least 70%, 75%, 80%, 81%, 82%, 83%, 84%, 85%, 86%, 87%, 88%, 89%, 90%, 91%, 92%, 93%, 94%, 95%, 96%, 97%, 98%, 99% or more sequence identity to a reference amino acid sequence comprising a substitution or substitution set of an engineered acetate kinase variant set forth in Tables 7.2, 8.2, 9.2, 10.2, 11.2, 12.2, 14.2, 15.2, 16.2, 17.2, 19.2, 22.2, 23.2, 24.2, 25.2, 26.2, 27.2, or 28.2, wherein the amino acid positions are relative to the reference sequence corresponding to amino acid residues 12-417 of SEQ ID NO: 4, or relative to the reference sequence corresponding to SEQ ID NO: 4.

[0019] In some embodiments, the engineered acetate kinase comprises an amino acid sequence having at least 70%, 75%, 80%, 81%, 82%, 83%, 84%, 85%, 86%, 87%, 88%, 89%, 90%, 91%, 92%, 93%, 94%, 95%, 96%, 97%, 98%, 99%, or more sequence identity to the reference sequence corresponding to residues 12-417 of SEQ ID NO: 254, 396, 620, 846, 1240, or 1250, or to the reference sequence corresponding to SEQ ID NO: 254, 396, 620, 846, 1240, or 1250.

[0020] In some embodiments, the engineered acetate kinase comprises an amino acid sequence having at least 70%, 75%, 80%, 81%, 82%, 83%, 84%, 85%, 86%, 87%, 88%, 89%, 90%, 91%, 92%, 93%, 94%, 95%, 96%, 97%, 98%, 99%, or more sequence identity to a reference sequence corresponding to residues 12-417 of an even-numbered SEQ ID NO. of SEQ ID NOs: 14-566, 612-868, 894-924, and 940-1390, or to a reference sequence corresponding to an even-numbered SEQ ID NO. of SEQ ID NOs: 14-566, 612-868, 894-924, and 940-1390.

[0021] In some embodiments, the engineered acetate kinase comprises an amino acid sequence having at least 70%, 75%, 80%, 81%, 82%, 83%, 84%, 85%, 86%, 87%, 88%, 89%, 90%, 91%, 92%, 93%, 94%, 95%, 96%, 97%, 98%, 99%, or more sequence identity to the reference sequence corresponding to residues 12-417 of SEQ ID NO: 254, 396, 620, 846, 1240, or 1250, or to the reference sequence corresponding to SEQ ID NO: 254, 396, 620, 846, 1240, or 1250, wherein the amino acid sequence comprises one or more substitutions relative to the reference sequence corresponding to residues 12-417 of SEQ ID NO: 254, 396, 620, 846, 1240, or 1250, or relative to the reference sequence corresponding to SEQ ID NO: 254, 396, 620, 846, 1240, or 1250.

[0022] In some embodiments, the engineered acetate kinase comprises an amino acid sequence having at least 70%, 75%, 80%, 81%, 82%, 83%, 84%, 85%, 86%, 87%, 88%, 89%, 90%, 91%, 92%, 93%, 94%, 95%, 96%, 97%, 98%, 99%, or more sequence identity to the reference sequence corresponding to residues 12-417 of an even-numbered SEQ ID NO. of SEQ ID NOs: 14-566, 612-868, 894-924, and 940-1390, or to the reference sequence corresponding to an even-numbered SEQ ID NO. of SEQ ID NOs: 14-566, 612-868, 894-924, and 940-1390, wherein the amino acid sequence comprises one or more substitutions relative to the reference sequence corresponding to residues 12-417 of SEQ ID NO: 254, 396, 620, 846, 1240, or 1250, or relative to the reference sequence corresponding to SEQ ID NO: 254, 396, 620, 846, 1240, or 1250.

[0023] In some embodiments, the amino acid sequence of the engineered acetate kinase comprises at least a substitution at amino acid position 4, 5, 10, 11, 13, 14, 15, 16, 18, 19, 22, 26, 27, 28, 30, 31, 32, 36, 38, 41, 43, 46, 49, 50, 52, 54, 55, 60, 61, 62, 63, 64, 65, 66, 68, 69, 72, 74, 75, 76, 77, 79, 80, 87, 88, 91, 97, 98, 107, 113, 114, 110, 115, 116, 117, 118, 119, 120, 121, 123, 126, 127, 128, 130, 133, 134, 135, 136, 137, 138, 139, 141, 142, 143, 144, 145, 146, 147, 148, 149, 150, 151, 152, 156, 157, 160, 163, 165, 167, 170, 176, 180, 182, 183, 189, 190, 192, 196, 199, 201, 204, 205, 207, 208, 209, 210, 211, 212, 213, 216, 217, 223, 225, 227, 229, 231, 238, 240, 242, 246, 248, 249, 251, 257, 258, 260, 261, 263, 264, 265, 266, 268, 269, 270, 273, 276, 277, 279, 280, 284, 285, 288, 291, 292, 293, 295, 297, 298, 299, 300, 301, 302, 303, 304, 306, 308, 309, 310, 311, 312, 313, 314, 315, 316, 317, 318, 320, 323, 324, 329, 339, 340, 343, 344, 345, 347, 348, 349, 350, 352, 353, 354, 355, 356, 358, 360, 361, 363, 364, 369, 370, 372, 373, 374, 375, 376, 383, 384, 385, 387, 390, 391, 392, 393, 394, 395, 398, 400, 402, 404, 405, 406, 407, 408, or 409, or combinations thereof, wherein the amino acid positions are relative to the reference sequence corresponding to residues 12-417 of SEQ ID NO: 254, 396, 620, 846, 1240, or 1250, or relative to the reference sequence corresponding to SEQ ID NO: 254, 396, 620, 846, 1240, or 1250.

[0024] In some embodiments, the amino acid sequence of the engineered acetate kinase comprises at least a substitution at amino acid position 32, 54, 88, 147, 209, 277, 279, 293, 299, 313, or 344, or combinations thereof, wherein the amino acid positions are relative to the reference sequence corresponding to amino acid residues 12-417 of SEQ ID NO: 254, 396, 620, 846, 1240, or 1250, or relative to the reference sequence corresponding to SEQ ID NO: 254, 396, 620, 846, 1240, or 1250.

[0025] In some embodiments, the engineered acetate kinase comprises an amino acid sequence having at least 70%, 75%, 80%, 81%, 82%, 83%, 84%, 85%, 86%, 87%, 88%, 89%, 90%, 91%, 92%, 93%, 94%, 95%, 96%, 97%, 98%, 99%, or more sequence identity to the reference sequence corresponding to residues 12-417 of SEQ ID NO: 254, or to the reference sequence corresponding to SEQ ID NO: 254, wherein the amino acid sequence comprises one or more substitutions relative to the reference sequence corresponding to residues 12-417 of SEQ ID NO: 254, or relative to the reference sequence corresponding to SEQ ID NO: 254.

[0026] In some embodiments, the engineered acetate kinase comprises an amino acid sequence having at least 70%, 75%, 80%, 81%, 82%, 83%, 84%, 85%, 86%, 87%, 88%, 89%, 90%, 91%, 92%, 93%, 94%, 95%, 96%, 97%, 98%, 99%, or more sequence identity to the reference sequence corresponding to residues 12-417 of an even-numbered SEQ ID NO. of SEQ ID NOs: 396-566, or to the reference sequence corresponding to an even-numbered SEQ ID NO. of SEQ ID NOs: 396-566, wherein the amino acid sequence comprises one or more substitutions relative to the reference sequence corresponding to residues 12-417 of SEQ ID NO: 254, or relative to the reference sequence corresponding to SEQ ID NO: 254.

[0027] In some embodiments, the amino acid sequence of the engineered acetate kinase comprises at least a substitution at amino acid position(s) 299, 300, 303, 317, 144, 374, 63, 301, 134, 60, 65, 68, 55, 301/308, 110, 139, 64, 192, 80, 61, 249, 376, 143, 395, 217, 248, 295, 285, 74, 62, 76, or 79, or combinations thereof, wherein the amino acid positions are relative to the reference sequence corresponding to residues 12-417 of SEQ ID NO: 254, or relative to the reference sequence corresponding to SEQ ID NO: 254.

[0028] In some embodiments, the engineered acetate kinase comprises an amino acid sequence having at least 70%, 75%, 80%, 81%, 82%, 83%, 84%, 85%, 86%, 87%, 88%, 89%, 90%, 91%, 92%, 93%, 94%, 95%, 96%, 97%, 98%, 99%, or more sequence identity to the reference sequence corresponding to residues 12-417 of SEQ ID NO: 396, or to the reference sequence corresponding to SEQ ID NO: 396, wherein the amino acid sequence comprises one or more substitutions relative to the reference sequence corresponding to residues 12-417 of SEQ ID NO: 396, or relative to the reference sequence corresponding to SEQ ID NO: 396.

[0029] In some embodiments, the engineered acetate kinase comprises an amino acid sequence having at least 70%, 75%, 80%, 81%, 82%, 83%, 84%, 85%, 86%, 87%, 88%, 89%, 90%, 91%, 92%, 93%, 94%, 95%, 96%, 97%, 98%, 99%, or more sequence identity to the reference sequence corresponding to residues 12-417 of an even-numbered SEQ ID NO. of SEQ ID NOs: 612-802, or to the reference sequence corresponding to an even-numbered SEQ ID NO. of SEQ ID NOs: 612-802, wherein the amino acid sequence comprises one or more substitutions relative to the reference sequence corresponding to residues 12-417 of SEQ ID NO: 396, or relative to the reference sequence corresponding to SEQ ID NO: 396.

[0030] In some embodiments, the amino acid sequence of the engineered acetate kinase comprises at least a substitution or substitution set at amino acid position(s) 55/303/308/343/344, 32/55/344, 55/303/308/344, 295/303/308, 60/300/301/317, 344, 300/301/316/317/374, 55/344, 374, 295/308, 300/301/317, 301/317, 55/303/308, 300/301/374, 308, 317, 288, 320, 298, 312, 353, 348, 375, 304, 216, 217, 391, 292, 285, 225, 373, 300, 352, 354, 133, 293, 309, 190, 314, 297, 393, 350, 301, 372, 310, 299, 291, 284, or 313, wherein the amino acid positions are relative to the reference sequence corresponding to residues 12-417 of SEQ ID NO: 396, or relative to the reference sequence corresponding to SEQ ID NO: 396.

[0031] In some embodiments, the engineered acetate kinase comprises an amino acid sequence having at least 70%, 75%, 80%, 81%, 82%, 83%, 84%, 85%, 86%, 87%, 88%, 89%, 90%, 91%, 92%, 93%, 94%, 95%, 96%, 97%, 98%, 99%, or more sequence identity to the reference sequence corresponding to residues 12-417 of SEQ ID NO: 620, or to the reference sequence corresponding to SEQ ID NO: 620, wherein the amino acid sequence comprises one or more substitutions relative to the reference sequence corresponding to residues 12-417 of SEQ ID NO: 620, or relative to the reference sequence corresponding to SEQ ID NO: 620.

[0032] In some embodiments, the engineered acetate kinase comprises an amino acid sequence having at least 70%, 75%, 80%, 81%, 82%, 83%, 84%, 85%, 86%, 87%, 88%, 89%, 90%, 91%, 92%, 93%, 94%, 95%, 96%, 97%, 98%, 99%, or more sequence identity to the reference sequence corresponding to residues 12-417 of an even-numbered SEQ ID NO. of SEQ ID NOs: 804-868, 894-924, 940-980, 1240, 1250, and 1388-1390, or to the reference sequence corresponding to an even-numbered SEQ ID NO. of SEQ ID NOs: 804-868, 894-924, 940-980, 1240, 1250, and 1388-1390, wherein the amino acid sequence comprises one or more substitutions relative to the reference sequence corresponding to residues 12-417 of SEQ ID NO: 620, or relative to the reference sequence corresponding to SEQ ID NO: 620.

[0033] In some embodiments, the amino acid sequence of the engineered acetate kinase comprises at least a substitution or substitution set at amino acid position(s) 350, 376, 393, 372, 279, 300, 291, 314, 10, 285, 373, 317, 238, 216, 304, 309, 293, 246, 27, 391, 196, 299, or 349, or combinations thereof, wherein the amino acid positions are relative to the reference sequence corresponding to residues 12-417 of SEQ ID NO: 620, or relative to the reference sequence corresponding to SEQ ID NO: 620.

[0034] In some embodiments, the amino acid sequence of the engineered acetate kinase comprises at least a substitution or substitution set at amino acid position(s) 251, 242, 393, 18, 299, 316, 344, 400, 340, 347, 217, 394, 22, 309, 372, 285, 291, 297, 300, 279, 43, 225, 216, 352, 302, 292, 353, 189, 375, 279/293, 32/54/88/209/277/279/293, 32/38/54/88/209/277/279/293, or 16/32/38/54/88/209/277/279/293, wherein the amino acid positions are relative to the reference sequence corresponding to residues 12-417 of SEQ ID NO: 620, or relative to the reference sequence corresponding to SEQ ID NO: 620.

[0035] In some embodiments, the engineered acetate kinase comprises an amino acid sequence having at least 70%, 75%, 80%, 81%, 82%, 83%, 84%, 85%, 86%, 87%, 88%, 89%, 90%, 91%, 92%, 93%, 94%, 95%, 96%, 97%, 98%, 99%, or more sequence identity to the reference sequence corresponding to residues 12-417 of SEQ ID NO: 846, or to the reference sequence corresponding to SEQ ID NO: 846, wherein the amino acid sequence comprises one or more substitutions relative to the reference sequence corresponding to residues 12-417 of SEQ ID NO: 846, or relative to the reference sequence corresponding to SEQ ID NO: 846.

[0036] In some embodiments, the engineered acetate kinase comprises an amino acid sequence having at least 70%, 75%, 80%, 81%, 82%, 83%, 84%, 85%, 86%, 87%, 88%, 89%, 90%, 91%, 92%, 93%, 94%, 95%, 96%, 97%, 98%, 99%, or more sequence identity to the reference sequence corresponding to residues 12-417 of an even-numbered SEQ ID NO. of SEQ ID NOs: 982-1238, or to the reference sequence corresponding to an even-numbered SEQ ID NO. of SEQ ID NOs: 982-1238, wherein the amino acid sequence comprises one or more substitutions relative to the reference sequence corresponding to residues 12-417 of SEQ ID NO: 846, or relative to the reference sequence corresponding to SEQ ID NO: 846.

[0037] In some embodiments, the amino acid sequence of the engineered acetate kinase comprises at least a substitution or substitution set at amino acid position(s) 19, 385, 231, 209, 31, 370, 183, 258, 14, 212, 355, 54, 240, 323, 356, 182, 263, 266, 119, 114, 118, 211, 358, 121, 277, 265, 306, 318, 28, 257, 269, 315, 38, 114/119/123, 205, 88, 152, 210, 384, 273, 180, 201, 402, 207, 127, 199, 128, 329, 91, 87, 264, 113/229, 30, 261, 398, 405, 363, 324, 204, 409, 213, 227, 361, 229, 383, 32/88, 149, 36, 88/387,360, 150, 270, 49/54, 176, 406, 260, 167, 268, 364, 390, 117, 13, 116, or 279/293, wherein the amino acid positions are relative to the reference sequence corresponding to residues 12-417 of SEQ ID NO: 846, or relative to the reference sequence corresponding to SEQ ID NO: 846.

[0038] In some embodiments, the engineered acetate kinase comprises an amino acid sequence having at least 70%, 75%, 80%, 81%, 82%, 83%, 84%, 85%, 86%, 87%, 88%, 89%, 90%, 91%, 92%, 93%, 94%, 95%, 96%, 97%, 98%, 99%, or more sequence identity to the reference sequence corresponding to residues 12-417 of SEQ ID NO: 1240, or to the reference sequence corresponding to SEQ ID NO: 1240, wherein the amino acid sequence comprises one or more substitutions relative to the reference sequence corresponding to residues 12-417 of SEQ ID NO: 1240, or relative to the reference sequence corresponding to SEQ ID NO: 1240.

[0039] In some embodiments, the engineered acetate kinase comprises an amino acid sequence having at least 70%, 75%, 80%, 81%, 82%, 83%, 84%, 85%, 86%, 87%, 88%, 89%, 90%, 91%, 92%, 93%, 94%, 95%, 96%, 97%, 98%, 99%, or more sequence identity to the reference sequence corresponding to residues 12-417 of an even-numbered SEQ ID NO. of SEQ ID NOs: 1242-1346, or to the reference sequence corresponding to an even-numbered SEQ ID NO. of SEQ ID NOs: 1242-1346, wherein the amino acid sequence comprises one or more substitutions relative to the reference sequence corresponding to residues 12-417 of SEQ ID NO: 1240, or relative to the reference sequence corresponding to SEQ ID NO: 1240.

[0040] In some embodiments, the amino acid sequence of the engineered acetate kinase comprises at least a substitution or substitution set at amino acid position(s) 19/22/285/300, 285/297/398, 127/183/297, 19/127/300, 32/54/88/209/277, 277/291, 127/183/300/398, 19/22/398, 32/54/209/277, 398, 16/28/54, 88/209/277, 127/297, 14/32/291, 19/127/183/297/300/398, 16/88, 54/277, 32, 16, 32/54/209, 22/183/297/398, 88, 14/209, 16/32/54/209/277, 19/127/292/300/398, 54/291, 54/88/277, 32/54/88/291, 209, 54/209, 209/291, 19/127, 291, 88/277, 32/209, 127/285, 32/88/209, 14/54/291, 14/88, 285/300, 127/285/297, 16/54/277, 88/209/223, 4, 32/88/277, 127/297/398, 32/209/291, 32/88, 22/38/127/300, 38/127/297, or 285/297, wherein the amino acid positions are relative to the reference sequence corresponding to residues 12-417 of SEQ ID NO: 1240, or relative to the reference sequence corresponding to SEQ ID NO: 1240.

[0041] In some embodiments, the engineered acetate kinase comprises an amino acid sequence having at least 70%, 75%, 80%, 81%, 82%, 83%, 84%, 85%, 86%, 87%, 88%, 89%, 90%, 91%, 92%, 93%, 94%, 95%, 96%, 97%, 98%, 99%, or more sequence identity to the reference sequence corresponding to residues 12-417 of SEQ ID NO: 1250, or to the reference sequence corresponding to SEQ ID NO: 1250, wherein the amino acid sequence comprises one or more substitutions relative to the reference sequence corresponding to residues 12-417 of SEQ ID NO: 1250, or relative to the reference sequence corresponding to SEQ ID NO: 1250.

[0042] In some embodiments, the engineered acetate kinase comprises an amino acid sequence having at least 70%, 75%, 80%, 81%, 82%, 83%, 84%, 85%, 86%, 87%, 88%, 89%, 90%, 91%, 92%, 93%, 94%, 95%, 96%, 97%, 98%, 99%, or more sequence identity to the reference sequence corresponding to residues 12-417 of an even-numbered SEQ ID NO. of SEQ ID NOs: 1348-1386, or to the reference sequence corresponding to an even-numbered SEQ ID NO. of SEQ ID NOs: 1348-1386, wherein the amino acid sequence comprises one or more substitutions relative to the reference sequence corresponding to residues 12-417 of SEQ ID NO: 1250, or relative to the reference sequence corresponding to SEQ ID NO: 1250.

[0043] In some embodiments, the amino acid sequence of the engineered acetate kinase comprises at least a substitution at amino acid position 165, 345, 163, 320, 347, 316, 107, 348, 311, 339, 317, 22, 151, 138, 407, 223, 391, or 393, or combinations thereof, wherein the amino acid positions are relative to the reference sequence corresponding to residues 12-417 of SEQ ID NO: 1250, or relative to the reference sequence corresponding to SEQ ID NO: 1250.

[0044] In some embodiments, the amino acid sequence of the engineered acetate kinase comprises at least one substitution as set forth in Tables 7.2, 8.2, 9.2, 10.2, 11.2, 12.2, 14.2, 15.2, 16.2, 17.2, 19.2, 22.2, 23.2, 24.2, 25.2, 26.2, 27.2, and 28.2, wherein the amino acid positions are relative to the reference sequence corresponding to amino acid residues 12-417 of SEQ ID NO: 4, 254, 396, 620, 846, 1240, or 1250, or relative to the reference sequence corresponding to SEQ ID NO: 4, 254, 396, 620, 846, 1240, or 1250.

[0045] In some embodiments, the amino acid sequence of the engineered acetate kinase comprises at least a substitution or substitution set of an engineered acetate kinase variant set forth in Tables 7.2, 8.2, 9.2, 10.2, 11.2, 12.2, 14.2, 15.2, 16.2, 17.2, 19.2, 22.2, 23.2, 24.2, 25.2, 26.2, 27.2, and 28.2, wherein the amino acid positions are relative to the reference sequence corresponding to amino acid residues 12-417 of SEQ ID NO: 4, 254, 396, 620, 846, 1240, or 1250, or relative to the reference sequence corresponding to SEQ ID NO: 4, 254, 396, 620, 846, 1240, or 1250.

[0046] In some embodiments, the engineered acetate kinase comprises an amino acid sequence having at least 70%, 75%, 80%, 81%, 82%, 83%, 84%, 85%, 86%, 87%, 88%, 89%, 90%, 91%, 92%, 93%, 94%, 95%, 96%, 97%, 98%, 99% or more sequence identity to a reference amino acid sequence comprising a substitution or substitution set of an engineered acetate kinase variant set forth in Tables 7.2, 8.2, 9.2, 10.2, 11.2, 12.2, 14.2, 15.2, 16.2, 17.2, 19.2, 22.2, 23.2, 24.2, 25.2, 26.2, 27.2, and 28.2, wherein the amino acid positions are relative to the reference sequence corresponding to amino acid residues 12-417 of SEQ ID NO: 4, 254, 396, 620, 846, 1240, or 1250, or relative to the reference sequence corresponding to SEQ ID NO: 4, 254, 396, 620, 846, 1240, or 1250.

[0047] In some embodiments, amino acid sequence of the engineered acetate kinase comprises residues 12-417 of an even-numbered SEQ ID NO. of SEQ ID NOs: 14-566, 612-868, 894-924, and 940-1390, or comprises an even-numbered SEQ ID NO. of SEQ ID NOs: 14-566, 612-868, 894-924, and 940-1390.

[0048] In some embodiments, amino acid sequence of the engineered acetate kinase comprises residues 12-417 of SEQ ID NO: 254, 396, 620, 846, 1240, or 1250, or comprises SEQ ID NO: 254, 396, 620, 846, 1240, or 1250.

[0049] In some embodiments, the engineered acetate kinase has acetate kinase activity and at least one improved property as compared to a reference acetate kinase. In some embodiments, the improved property is selected from i) increased activity in conversion of unmodified nucleoside diphosphate to corresponding nucleotide triphosphate, ii) increased activity in conversion of substrate 2′-fluoro-nucleoside 5′-diphosphate (2′-fluoro-NDP) to product 2′-fluoro-nucleoside-5′-triphosphate (2′-fluoro-NTP), iii) increased activity in conversion of substrate 2′-O-methyl nucleoside-5′-diphosphate (2′-O-methyl-NDP) to product 2′-O-methyl nucleoside-5′-triphosphate (2′-O-methyl-NTP), iv) increased activity in conversion of substrate 2′-fluoro-nucleoside 5′-diphosphate-3′-phosphate (2′-fluoro-NDP-3′-phosphate) to product 2′-fluoro-nucleoside-5′-triphosphate-3′-phosphate, v) increased activity in conversion of substrate 2′-O-methyl-nucleoside 5′-diphosphate-3′-phosphate to product 2′-O-methyl-nucleoside 5′-triphosphate-3′-phosphate, vi) increased stability, and vii) increased thermostability, or any combinations of i), ii), iii), iv), v), vi) and vii) compared to a reference acetate kinase. In some embodiments, the reference acetate kinase has an amino acid sequence corresponding to residues 12-417 of SEQ ID NO: 4, 254, 396, 620, 846, 1240, or 1250, or an amino acid sequence corresponding to SEQ ID NO: 4, 254, 396, 620, 846, 1240, or 1250. In some embodiments, the reference acetate kinase has an amino acid sequence corresponding to residues 12-417 of SEQ ID NO: 4, or an amino acid sequence corresponding to SEQ ID NO: 4.

[0050] In some embodiments, the engineered acetate kinase is purified. In some embodiments, the engineered acetate kinase is immobilized on a support medium.

[0051] In a further aspect, the present disclosure provide a recombinant polynucleotide comprising a polynucleotide sequence encoding an engineered acetate kinase described herein.

[0052] In some embodiments, the recombinant polynucleotide comprises a polynucleotide sequence having at least 70%, 75%, 80%, 81%, 82%, 83%, 84%, 85%, 86%, 87%, 88%, 89%, 90%, 91%, 92%, 93%, 94%, 95%, 96%, 97%, 98%, 99%, or more sequence identity to a reference polynucleotide sequence corresponding to nucleotide residues 34-1251 of SEQ ID NO: 3, 253, 395, 619, 845, 1239, or 1249, or to a reference polynucleotide sequence corresponding to SEQ ID NO: 3, 253, 395, 619, 845, 1239, or 1249, wherein the recombinant polynucleotide encodes an acetate kinase.

[0053] In some embodiments, the recombinant polynucleotide comprises a polynucleotide sequence having at least 70%, 75%, 80%, 81%, 82%, 83%, 84%, 85%, 86%, 87%, 88%, 89%, 90%, 91%, 92%, 93%, 94%, 95%, 96%, 97%, 98%, 99%, or more sequence identity to a reference polynucleotide sequence corresponding to nucleotide residues 34-1251 of an odd-numbered SEQ ID NO. of SEQ ID NOs: 13-565, 611-867, 893-923, and 939-1389, or to a reference polynucleotide sequence corresponding to an odd-numbered SEQ ID NO. of SEQ ID NOs: 13-565, 611-867, 893-923, and 939-1389, wherein the recombinant polynucleotide encodes an engineered acetate kinase.

[0054] In some embodiments, the polynucleotide sequence of recombinant polynucleotide includes preferred codons or is codon optimized.

[0055] In some embodiments, the recombinant polynucleotide comprises a polynucleotide sequence comprising nucleotide residues 34-1251 of an odd-numbered SEQ ID NO. of SEQ ID NOs: 13-565, 611-867, 893-923, and 939-1389, or comprises an odd-numbered SEQ ID NO. of SEQ ID NOs: 13-565, 611-867, 893-923, and 939-1389.

[0056] In another aspect, the present disclosure provides an expression vector comprising a recombinant polynucleotide encoding an engineered acetate kinase. In some embodiments, the recombinant polynucleotide of the expression vector is operably linked to a control sequence.

[0057] In another aspect, the present disclosure also provides a host cell comprising an expression vector described herein. In some embodiments, the host cell is a bacterial cell, fungal cell, insect cell, or mammalian cell.

[0058] In another aspect, the present disclosure provides a method of producing an engineered acetate kinase polypeptide, comprising culturing a host cell comprising an expression vector described herein under suitable culture conditions such that the encoded engineered acetate kinase polypeptide is produced. In some embodiments, the method further comprises recovering or isolating the acetate kinase from the culture and/or host cells. In some embodiments, the method further comprises purifying the engineered acetate kinase.

[0059] In another aspect, the present disclosure provides methods of using the engineered acetate kinase for chemical conversions. In some embodiments, the engineered acetate kinase is used for converting a substrate nucleoside diphosphate (NDP) to the product nucleotide triphosphate (NTP). In some embodiments, a method of converting a NDP to corresponding NTP comprises contacting a substrate NDP with an engineered acetate kinase in the presence of phosphate donor under suitable reaction conditions to convert the NDP to the corresponding product NTP.

[0060] In some embodiments, the substrate NDP is a naturally occurring or unmodified NDP. In some embodiments, the substrate NDP is a modified nucleoside diphosphate. In some embodiments, the modified NDP comprises a modified sugar moiety, modified nucleobase, or modified phosphate, or any combinations thereof.

[0061] In some embodiments, the engineered acetate kinase is used to convert substrate acetate to the product acetyl phosphate. In some embodiments, a method of converting acetate to acetyl phosphate comprises contacting acetate with an engineered acetate kinase in presence of NTP under suitable reactions conditions to convert acetate to the product acetyl phosphate.

### DETAILED DESCRIPTION

[0062] The present disclosure provides acetate kinase enzymes, where the enzymes efficiently catalyze the conversion of NDP to NTP in presence of a phosphate donor. Further provided are acetate kinase enzymes engineered to have improved properties as compared to the parent acetate kinase, for example, increased activity, and in some embodiments, increased conversion of modified nucleoside diphosphate to the corresponding nucleoside triphosphate.

### Abbreviations and Definitions

[0063] In reference to the present invention, the technical and scientific terms used in the descriptions herein will have the meanings commonly understood by one of ordinary skill in the art, unless specifically defined otherwise. Accordingly, the following terms are intended to have the following meanings.

[0064] As used herein, the singular forms “a”, “an” and “the” include plural referents unless the context clearly indicates otherwise. Thus, for example, reference to “a polypeptide” includes more than one polypeptide.

[0065] Similarly, “comprise,” “comprises,” “comprising” “include,” “includes,” and “including” are interchangeable and not intended to be limiting. Thus, as used herein, the term “comprising” and its cognates are used in their inclusive sense (i.e., equivalent to the term “including” and its corresponding cognates).

[0066] It is to be further understood that where descriptions of various embodiments use the term “comprising,” those skilled in the art would understand that in some specific instances, an embodiment can be alternatively described using language “consisting essentially of” or “consisting of.”

[0067] “About” means an acceptable error for a particular value. In some instances, “about” means within 0.05%, 0.5%, 1.0%, or 2.0%, of a given value range. In some instances, “about” means within 1, 2, 3, or 4 standard deviations of a given value.

[0068] “EC” number refers to the Enzyme Nomenclature of the Nomenclature Committee of the International Union of Biochemistry and Molecular Biology (NC-IUBMB). The IUBMB biochemical classification is a numerical classification system for enzymes based on the chemical reactions they catalyze.

[0069] “ATCC” refers to the American Type Culture Collection whose biorepository collection includes genes and strains.

[0070] “NCBI” refers to National Center for Biological Information and the sequence databases provided therein.

[0071] “Acetate kinase (“AcK”) refers to enzymes that are capable of catalyzing the phosphorylation of nucleoside diphosphates or analogues thereof, to nucleoside triphosphates or the corresponding analogues, using acetyl phosphate or another phosphoryl group donor. Acetate kinases as used herein includes naturally occurring, wild-type enzymes or engineered enzymes. In some embodiments, acetate kinases are naturally occurring, wild-type basic metabolic enzymes found primarily in prokaryotes that catalyze the following reaction: acetate+ATP↔acetyl phosphate+ADP. Acetyl phosphate is an intermediate in the formation of acetyl-CoA. In some embodiments, acetate kinases are derived from the naturally occurring, wild-type enzymes.

[0072] “Adenosine kinase,” “AdoK,” or “Adk,” refer to an enzyme that catalyzes the phosphorylation of adenosine (A or ADO) to adenosine-5′-monophosphate (AMP). In some embodiments, adenosine kinase is classified in EC 2.7.1.20. Although the primary substrate is adenosine, adenosine kinases as used herein include enzymes that act on other nucleosides.

[0073] “Adenylate kinase,” “AdyK,” or “Ayk” refers to an enzyme that catalyzes the interconversion of ATP, ADP, and AMP through transfer of phosphoryl groups. In some embodiments, adenylate kinase also includes enzymes capable of catalyzing the interconversion of NTP, NDP and NMP. In some embodiments, adenylate kinase are enzymes classified in EC 2.7.3.4.

[0074] “Pyruvate kinase” refers to an enzyme that catalyzes conversion of ADP and phosphoenolpyruvate to ATP and pyruvate. In some embodiments, pyruvate kinase are enzymes classified in EC 2.7.1.40.

[0075] “Creatine kinase” refers to an enzyme that catalyzes the reversible interconversion of creatine: ATP to creatine phosphate: ADP.

[0076] “Polyphosphate kinase” refers to an enzyme that catalyzes the transfer of phosphate group(s) from high-energy, phosphate-donating molecules, such as polyphosphate (PolyPn), to specific substrates/molecules. Two families of polyphosphate kinases, PPKK1 and PPK2, are known. PPK1s preferentially synthesize polyphosphate from NTP and the corresponding reverse reaction, and PPK2s preferentially consume polyphosphate to phosphorylate nucleoside mono- or diphosphates, and the corresponding reverse reactions. In some embodiments, polyphosphate kinase includes enzymes classified in EC 2.7.4.1.

[0077] “Pyruvate oxidase” or “Pox” refers to an enzyme that catalyzes the reaction between pyruvate, inorganic phosphate, and oxygen to generate acetyl phosphate and H₂O₂. In some embodiments, pyruvate oxidase include enzymes classified in EC 1.2. 3.3.

[0078] “Catalase” refers to an enzyme that converts hydrogen peroxide (H₂O₂) to H₂O and O₂. Catalase can be used to remove residual hydrogen peroxide in applications where hydrogen peroxide is present or is a product in a process. In some embodiments, catalases includes enzymes classified in EC 1.11.1.6.

[0079] “Protein,” “polypeptide,” and “peptide” are used interchangeably herein to denote a polymer of at least two amino acids covalently linked by an amide bond, regardless of length or post-translational modification (e.g., glycosylation or phosphorylation). Included within this definition are D- and L-amino acids, and mixtures of D- and L-amino acids, as well as polymers comprising D- and L-amino acids, and mixtures of D- and L-amino acids.

[0080] “Fusion protein,” and “chimeric protein” and “chimera” refer to hybrid proteins created through the joining of two or more polynucleotides that originally encode separate proteins. In some embodiments, fusion proteins are created by recombinant technology (e.g., molecular biology techniques known in the art).

[0081] “Amino acids” are referred to herein by either their commonly known three-letter symbols or by the one-letter symbols recommended by IUPAC-IUB Biochemical Nomenclature Commission. The abbreviations used for the genetically encoded amino acids are conventional and are as follows: alanine (Ala or A), arginine (Arg or R), asparagine (Asn or N), aspartate (Asp or D), cysteine (Cys or C), glutamate (Glu or E), glycine (Gly or G), glutamine (Gln or Q), histidine (His or H), isoleucine (Ile or I), leucine (Leu or L), lysine (Lys or K), methionine (Met or M), phenylalanine (Phe or F), proline (Pro or P), serine (Ser or S), threonine (Thr or T), tryptophan (Trp or W), tyrosine (Tyr or Y), and valine (Val or V). When the three-letter abbreviations are used, unless specifically preceded by an “L” or a “D” or clear from the context in which the abbreviation is used, the amino acid may be in either the L- or D-configuration about α-carbon (Cα). For example, whereas “Ala” designates alanine without specifying the configuration about the α-carbon, “D-Ala” and “L-Ala” designate D-alanine and L-alanine, respectively. When the one-letter abbreviations are used, upper case letters designate amino acids in the L-configuration about the α-carbon and lower case letters designate amino acids in the D-configuration about the α-carbon. For example, “A” designates L-alanine and “a” designates D-alanine. When polypeptide sequences are presented as a string of one-letter or three-letter abbreviations (or mixtures thereof), the sequences are presented in the amino (N) to carboxy (C) direction in accordance with common convention.

[0082] “Polynucleotide” and “nucleic acid’ refer to two or more nucleotides that are covalently linked together. The polynucleotide may be wholly comprised of ribonucleotides (i.e., RNA), wholly comprised of 2′ deoxyribonucleotides (i.e., DNA), or comprised of mixtures of ribo- and 2′ deoxyribonucleotides. While the nucleosides will typically be linked together via standard phosphodiester linkages, the polynucleotides may include one or more non-standard linkages. The polynucleotide may be single-stranded or double-stranded, or may include both single-stranded regions and double-stranded regions. Moreover, while a polynucleotide will typically be composed of the naturally occurring encoding nucleobases (i.e., adenine, guanine, uracil, thymine and cytosine), it may include one or more modified and/or synthetic nucleobases, such as, for example, inosine, xanthine, hypoxanthine, etc. In some embodiments, such modified or synthetic nucleobases are nucleobases encoding amino acid sequences.

[0083] The abbreviations used for the genetically encoding nucleosides are conventional and are as follows: adenosine (A); guanosine (G); cytidine (C); thymidine (T); and uridine (U). Unless specifically delineated, the abbreviated nucleosides may be either ribonucleosides or 2′-deoxyribonucleosides. The nucleosides may be specified as being either ribonucleosides or 2′-deoxyribonucleosides on an individual basis or on an aggregate basis. When nucleic acid sequences are presented as a string of one-letter abbreviations, the sequences are presented in the 5′ to 3′ direction in accordance with common convention, and the phosphates are not indicated.

[0084] “Nucleobase” or “base” refers to those naturally occurring and synthetic heterocyclic moieties commonly known to those who utilize nucleic acid or polynucleotide technology to thereby generate polymers that can hybridize to polynucleotides in a sequence-specific manner. Non-limiting examples of nucleobases include, among others, adenine, cytosine, guanine, thymine, uracil, 5-propynyl-uracil, 2-thio-5-propynyl-uracil, 5-methylcytosine, pseudoisocytosine, pseudoisouridine, 2-thiouracil and 2-thiothymine, 2-aminopurine, N9-(2-amino-6-chloropurine), N9-(2,6-diaminopurine), hypoxanthine, N9-(7-deaza-guanine), N9-(7-deaza-8-aza-guanine) and N8-(7-deaza-8-aza-adenine).

[0085] “Nucleoside” refers to glycosylamines comprising a nucleobase, and a 5-carbon sugar (e.g., ribose, deoxyribose, or arabinose). Non-limiting examples of nucleosides include cytidine, uridine, adenosine, guanosine, thymidine, and inosine. In contrast, the term “nucleotide” refers to the glycosylamines comprising a nucleobase, a 5-carbon sugar, and one or more phosphate groups, as further described herein. In some embodiments, nucleosides can be phosphorylated by kinases to produce nucleotides.

[0086] “Nucleoside monophosphate” or “NMP” refers to glycosylamines comprising a nucleobase, a 5-carbon sugar (e.g., ribose, deoxyribose, or arabinose), and a phosphate moiety at the 5′-position. In some embodiments herein, “nucleoside monophosphate” is abbreviated as “NMP”. Non-limiting examples of nucleoside monophosphates include cytidine monophosphate (CMP), uridine monophosphate (UMP), adenosine monophosphate (AMP), guanosine monophosphate (GMP), thymidine monophosphate (TMP), and inosine monophosphate (IMP). In some embodiments, “nucleoside monophosphate” may refer to a non-natural nucleoside monophosphate. The terms “nucleoside” and “nucleotide” may be used interchangeably in some contexts.

[0087] “Nucleoside diphosphate” or “NDP” refers to glycosylamines comprising a nucleobase, a 5-carbon sugar (e.g., ribose, deoxyribose, or arabinose), and a diphosphate (i.e., pyrophosphate) moiety at the 5′-position. In some embodiments herein, “nucleoside diphosphate” is abbreviated as “NDP”. Non-limiting examples of nucleoside diphosphates include cytidine diphosphate (CDP), uridine diphosphate (UDP), adenosine diphosphate (ADP), guanosine diphosphate (GDP), thymidine diphosphate (TDP), and inosine diphosphate (IDP). In some embodiments, “nucleoside diphosphate” may refer to a non-natural nucleoside diphosphate. The terms “nucleoside” and “nucleotide” may be used interchangeably in some contexts.

[0088] “Nucleoside triphosphate” or “NTP” refers to glycosylamines comprising a nucleobase, a 5-carbon sugar (e.g., ribose, deoxyribose, or arabinose), and a triphosphate moiety at the 5′-position. In some embodiments herein, “nucleoside triphosphate” is abbreviated as “NTP”. Non-limiting examples of nucleoside triphosphates include cytidine triphosphate (CTP), uridine triphosphate (UTP), adenosine triphosphate (ATP), guanosine triphosphate (GTP), thymidine triphosphate (TTP), and inosine triphosphate (ITP). In some embodiments, “nucleoside triphosphate” may refer to a non-natural nucleoside triphosphate. The terms “nucleoside” and “nucleotide” may be used interchangeably in some contexts.

[0089] “Modified” in context of a nucleoside or nucleotide refers to a nucleoside or nucleotide that has been altered to a non-naturally occurring nucleoside or nucleotide. In some embodiments, modifications to nucleoside or nucleotides include modifications to the nucleobase, sugar moiety, and/or phosphate. In some embodiments, the common modifications of the 2′-position of the sugar residue with fluoro (F) or —O—CH₃ is denoted by “IN” and “mN”, respectively, where N denotes the nucleobase on the nucleoside or nucleotide. In some embodiments, the presence of a 5′-thiophosphate is denoted by “*N”.

[0090] “Locked nucleoside” or “locked nucleotide” refers to nucleoside or nucleotide, respectively, in which the ribose moiety is modified with a bridge connecting the 2′ oxygen and 4′ carbon (see, e.g., Obika et al., Tetrahedron Letters, 1997, 38 (50): 8735-8738; Orum et al., Current Pharmaceutical Design, 2008, 14 (11): 1138-1142). In some embodiments, the bridge is a methylene or ethylene bridge. In some embodiments, the ribose moiety of the locked nucleoside or locked nucleotide is in the C3′-endo (beta-D-LNA) or C2′-endo (alpha-L-LNA) conformation.

[0091] “Biocatalysis,” “biocatalytic,” “biotransformation,” and “biosynthesis” refer to the use of enzymes to perform chemical reactions on organic compounds.

[0092] “Wild-type” and “naturally occurring” refer to the form found in nature. For example, a wild-type polypeptide or polynucleotide sequence is a sequence present in an organism that can be isolated from a source in nature and which has not been intentionally modified by human manipulation.

[0093] “Recombinant,” “engineered,” “variant,” “non-natural,” and “non-naturally occurring” when used with reference to a cell, nucleic acid, or polypeptide, refers to a material, or a material corresponding to the natural or native form of the material, which has been modified in a manner that would not otherwise exist in nature. In some embodiments, the cell, nucleic acid or polypeptide is identical a naturally occurring cell, nucleic acid or polypeptide, but is produced or derived from synthetic materials and/or by manipulation using recombinant techniques. Non-limiting examples include, among others, recombinant cells expressing genes that are not found within the native (non-recombinant) form of the cell or express native genes that are otherwise expressed at a different level.

[0094] “Percent (%) sequence identity” is used herein to refer to comparisons among polynucleotides or polypeptides, and are determined by comparing two optimally aligned sequences over a comparison window, wherein the portion of the polynucleotide or polypeptide sequence in the comparison window may comprise additions or deletions (i.e., gaps) as compared to the reference sequence for optimal alignment of the two sequences. The percentage may be calculated by determining the number of positions at which the identical nucleic acid base or amino acid residue occurs in both sequences to yield the number of matched positions, dividing the number of matched positions by the total number of positions in the window of comparison and multiplying the result by 100 to yield the percentage of sequence identity. Alternatively, the percentage may be calculated by determining the number of positions at which either the identical nucleic acid base or amino acid residue occurs in both sequences or a nucleic acid base or amino acid residue is aligned with a gap to yield the number of matched positions, dividing the number of matched positions by the total number of positions in the window of comparison and multiplying the result by 100 to yield the percentage of sequence identity. Those of skill in the art appreciate that there are many established algorithms available to align two sequences. Optimal alignment of sequences for comparison can be conducted by any suitable method, including, but not limited to the local homology algorithm of Smith and Waterman (Smith and Waterman, Adv. Appl. Math., 1981, 2:482), by the homology alignment algorithm of Needleman and Wunsch (Needleman and Wunsch, J. Mol. Biol., 1970, 48:443), by the search for similarity method of Pearson and Lipman (Pearson and Lipman, Proc. Natl. Acad. Sci. USA., 1988, 85:2444), by computerized implementations of these algorithms (e.g., GAP, BESTFIT, FASTA, and TFASTA in the GCG Wisconsin Software Package), or by visual inspection, as known in the art. Examples of algorithms that are suitable for determining percent sequence identity and sequence similarity include, but are not limited to the BLAST and BLAST 2.0 algorithms, which are described by Altschul et al. (See Altschul et al., J. Mol. Biol., 1990, 215:403-410; and Altschul et al., Nucl. Acids Res., 1977, 25 (17): 3389-3402, respectively). Software for performing BLAST analyses is publicly available through the National Center for Biotechnology Information website. This algorithm involves first identifying high scoring sequence pairs (HSPs) by identifying short words of length W in the query sequence, which either match or satisfy some positive-valued threshold score T when aligned with a word of the same length in a database sequence. T is referred to as, the neighborhood word score threshold (See, Altschul et al., supra). These initial neighborhood word hits act as seeds for initiating searches to find longer HSPs containing them. The word hits are then extended in both directions along each sequence for as far as the cumulative alignment score can be increased.

[0095] Cumulative scores are calculated using, for nucleotide sequences, the parameters M (reward score for a pair of matching residues; always >0) and N (penalty score for mismatching residues; always <0). For amino acid sequences, a scoring matrix is used to calculate the cumulative score. Extension of the word hits in each direction are halted when: the cumulative alignment score falls off by the quantity X from its maximum achieved value; the cumulative score goes to zero or below, due to the accumulation of one or more negative-scoring residue alignments; or the end of either sequence is reached. The BLAST algorithm parameters W, T, and X determine the sensitivity and speed of the alignment. The BLASTN program (for nucleotide sequences) uses as defaults a wordlength (W) of 11, an expectation (E) of 10, M=5, N=−4, and a comparison of both strands. For amino acid sequences, the BLASTP program uses as defaults a word length (W) of 3, an expectation (E) of 10, and the BLOSUM62 scoring matrix (See, Henikoff and Henikoff, Proc. Natl. Acad. Sci. USA, 1989, 89:10915). Exemplary determination of sequence alignment and % sequence identity can employ the BESTFIT or GAP programs in the GCG Wisconsin Software package (Accelrys, Madison WI), using default parameters provided.

[0096] “Substantial identity” refers to a polynucleotide or polypeptide sequence that has at least 80 percent sequence identity, at least 85 percent identity, at least between 89 to 95 percent sequence identity, or more usually, at least 99 percent sequence identity as compared to a reference sequence over a comparison window of at least 20 residue positions, frequently over a window of at least 30-50 residues, wherein the percentage of sequence identity is calculated by comparing the reference sequence to a sequence that includes deletions or additions which total 20 percent or less of the reference sequence over the window of comparison. In some specific embodiments applied to polypeptides, the term “substantial identity” means that two polypeptide sequences, when optimally aligned, such as by the programs GAP or BESTFIT using default gap weights, share at least 80 percent sequence identity, preferably at least 89 percent sequence identity, at least 95 percent sequence identity or more (e.g., 99 percent sequence identity). In some embodiments, residue positions that are not identical in sequences being compared differ by conservative amino acid substitutions.

[0097] “Reference sequence” refers to a defined sequence used as a basis for a sequence and/or activity comparison. A reference sequence may be a subset of a larger sequence, for example, a segment of a full-length gene or polypeptide sequence. Generally, a reference sequence is at least 20 nucleotide or amino acid residues in length, at least 25 residues in length, at least 50 residues in length, at least 100 residues in length or the full length of the nucleic acid or polypeptide. Since two polynucleotides or polypeptides may each (1) comprise a sequence (i.e., a portion of the complete sequence) that is similar between the two sequences, and (2) may further comprise a sequence that is divergent between the two sequences, sequence comparisons between two (or more) polynucleotides or polypeptides are typically performed by comparing sequences of the two polynucleotides or polypeptides over a “comparison window” to identify and compare local regions of sequence similarity. In some embodiments, a “reference sequence” can be based on a primary amino acid sequence, where the reference sequence is a sequence that can have one or more changes in the primary sequence.

[0098] “Comparison window” refers to a conceptual segment of contiguous nucleotide positions or amino acids residues wherein a sequence may be compared to a reference sequence. In some embodiments, the comparison window is at least 15 to 20 contiguous nucleotides or amino acids and wherein the portion of the sequence in the comparison window may comprise additions or deletions (i.e., gaps) of 20 percent or less as compared to the reference sequence (which does not comprise additions or deletions) for optimal alignment of the two sequences. In some embodiments, the comparison window can be longer than 15-20 contiguous residues, and includes, optionally 30, 40, 50, 100, or longer windows.

[0099] “Corresponding to,” “reference to,” and “relative to” when used in the context of the numbering of a given amino acid or polynucleotide sequence refer to the numbering of the residues of a specified reference sequence when the given amino acid or polynucleotide sequence is compared to the reference sequence. In other words, the residue number or residue position of a given polymer is designated with respect to the reference sequence rather than by the actual numerical position of the residue within the given amino acid or polynucleotide sequence. For example, a given amino acid sequence, such as that of an engineered acetate kinase, can be aligned to a reference sequence by introducing gaps to optimize residue matches between the two sequences. In these cases, although the gaps are present, the numbering of the residue in the given amino acid or polynucleotide sequence is made with respect to the reference sequence to which it has been aligned.

[0100] “Amino acid difference”, “residue difference” and “substitution” refer to a difference in the amino acid residue at a position of a polypeptide sequence relative to the amino acid residue at a corresponding position in a reference sequence. The positions of amino acid differences generally are referred to herein as “Xn,” where n refers to the corresponding position in the reference sequence upon which the residue difference is based. For example, a “residue difference at position X98 as compared to SEQ ID NO: 4” refers to a difference of the amino acid residue at the polypeptide position corresponding to position 98 of SEQ ID NO: 4. Thus, if the reference polypeptide of SEQ ID NO: 4 has a valine at position 98, then a “residue difference at position X98 as compared to SEQ ID NO: 4” refers to an amino acid substitution of any residue other than valine at the position of the polypeptide corresponding to position 98 of SEQ ID NO: 4. In most instances herein, the specific amino acid residue difference at a position is indicated as “XnY” where “Xn” specified the corresponding position as described above, and “Y” is the single letter identifier of the amino acid found in the engineered polypeptide (i.e., the different residue than in the reference polypeptide). In some instances (e.g., in the Tables presented in the Examples), the present invention also provides specific amino acid differences denoted by the conventional notation “AnB”, where A is the single letter identifier of the residue in the reference sequence, “n” is the number of the residue position in the reference sequence, and B is the single letter identifier of the residue substitution in the sequence of the engineered polypeptide. In some instances, an amino acid residue difference or substitution may be a deletion and may be denoted by a “-”. In some instances, a polypeptide of the present invention can include one or more amino acid residue differences relative to a reference sequence, which is indicated by a list of the specified positions where residue differences are present relative to the reference sequence. In some embodiments, the amino acid difference, e.g., a substitution, is denoted by the abbreviation “nB,” without the identifier for the residue in the reference sequence. In some embodiments, the phrase “an amino acid residue nB” denotes the presence of the amino residue in the engineered polypeptide, which may or may not be a substitution in context of a reference polypeptide or amino acid sequence.

[0101] In some instances, a polypeptide of the present disclosure can include one or more amino acid residue differences relative to a reference sequence, which is indicated by a list of the specified positions where residue differences are present relative to the reference sequence. In some embodiments, where more than one amino acid can be used in a specific residue position of a polypeptide, the various amino acid residues that can be used are separated by a “/” (e.g., X15A/X15I/X15T, X15G/I/T, or 15G/I/T).

[0102] “Amino acid substitution set” or “substitution set” refers to a group of amino acid substitutions in a polypeptide sequence, as compared to a reference sequence. A substitution set can have 2, 3, 4, 5, 6, 7, 8, 9, 10, 11, 12, 13, 14, 15, or more amino acid substitutions. In some embodiments, a substitution set refers to the set of amino acid substitutions that is present in any of the variant acetate kinases listed in the Tables provided in the Examples. In these substitution sets, the individual substitutions are separated by a semicolon (“;”; e.g., L147K; V308A) or slash (“/”; e.g., L147K/V308A or 147K/308A).

[0103] “Conservative amino acid substitution” refers to a substitution of a residue with a different residue having a similar side chain, and thus typically involves substitution of the amino acid in the polypeptide with amino acids within the same or similar defined class of amino acids. By way of example and not limitation, in some embodiments, an amino acid with an aliphatic side chain is substituted with another aliphatic amino acid (e.g., alanine, valine, leucine, and isoleucine); an amino acid with an hydroxyl side chain is substituted with another amino acid with an hydroxyl side chain (e.g., serine and threonine); an amino acids having aromatic side chains is substituted with another amino acid having an aromatic side chain (e.g., phenylalanine, tyrosine, tryptophan, and histidine); an amino acid with a basic side chain is substituted with another amino acid with a basis side chain (e.g., lysine and arginine); an amino acid with an acidic side chain is substituted with another amino acid with an acidic side chain (e.g., aspartic acid or glutamic acid); and/or a hydrophobic or hydrophilic amino acid is replaced with another hydrophobic or hydrophilic amino acid, respectively.

[0104] “Non-conservative substitution” refers to substitution of an amino acid in the polypeptide with an amino acid with significantly differing side chain properties. Non-conservative substitutions may use amino acids between, rather than within, the defined groups and affects (a) the structure of the peptide backbone in the area of the substitution (e.g., proline for glycine) (b) the charge or hydrophobicity, or (c) the bulk of the side chain. By way of example and not limitation, an exemplary non-conservative substitution can be an acidic amino acid substituted with a basic or aliphatic amino acid; an aromatic amino acid substituted with a small amino acid; and a hydrophilic amino acid substituted with a hydrophobic amino acid.

[0105] “Deletion” refers to modification to the polypeptide by removal of one or more amino acids from the reference polypeptide. Deletions can comprise removal of 1 or more amino acids, 2 or more amino acids, 5 or more amino acids, 10 or more amino acids, 15 or more amino acids, or 20 or more amino acids, up to 10% of the total number of amino acids, or up to 20% of the total number of amino acids making up the reference enzyme while retaining enzymatic activity and/or retaining the improved properties of an engineered acetate kinase enzyme. Deletions can be directed to the internal portions and/or terminal portions of the polypeptide. In various embodiments, the deletion can comprise a continuous segment or can be discontinuous. Deletions are typically indicated by “-” in amino acid sequences.

[0106] “Insertion” refers to modification to the polypeptide by addition of one or more amino acids to the reference polypeptide. Insertions can be in the internal portions of the polypeptide, or to the carboxy or amino terminus. Insertions as used herein include fusion proteins as is known in the art. The insertion can be a contiguous segment of amino acids or separated by one or more of the amino acids in the naturally occurring polypeptide.

[0107] “Functional fragment” and “biologically active fragment” are used interchangeably herein to refer to a polypeptide that has an amino-terminal and/or carboxy-terminal deletion(s) and/or internal deletions, but where the remaining amino acid sequence is identical to the corresponding positions in the sequence to which it is being compared (e.g., a full-length engineered acetate kinase of the present invention) and that retains substantially all of the activity of the full-length polypeptide.

[0108] “Isolated polypeptide” refers to a polypeptide which is substantially separated from other contaminants that naturally accompany it (e.g., protein, lipids, and polynucleotides). The term embraces polypeptides which have been removed or purified from their naturally occurring environment or expression system (e.g., within a host cell or via in vitro synthesis). The recombinant acetate kinase polypeptides may be present within a cell, present in the cellular medium, or prepared in various forms, such as lysates or isolated preparations. As such, in some embodiments, the recombinant acetate kinase polypeptides can be an isolated polypeptide.

[0109] “Substantially pure polypeptide” or “purified protein” refers to a composition in which the polypeptide species is the predominant species present (i.e., on a molar or weight basis it is more abundant than any other individual macromolecular species in the composition), and is generally a substantially purified composition when the object species comprises at least about 50 percent of the macromolecular species present by mole or % weight. However, in some embodiments, the composition comprising acetate kinase comprises acetate kinase that is less than 50% pure (e.g., about 10%, about 20%, about 30%, about 40%, or about 50%). Generally, a substantially pure acetate kinase composition comprises about 60% or more, about 70% or more, about 80% or more, about 90% or more, about 95% or more, and about 98% or more of all macromolecular species by mole or % weight present in the composition. In some embodiments, the object species is purified to essential homogeneity (i.e., contaminant species cannot be detected in the composition by conventional detection methods) wherein the composition consists essentially of a single macromolecular species. Solvent species, small molecules (<500 Daltons), and elemental ion species are not considered macromolecular species. In some embodiments, the isolated recombinant acetate kinase polypeptides are substantially pure polypeptide compositions.

[0110] “Improved enzyme property” refers to at least one improved property of an enzyme. In some embodiments, the present invention provides engineered acetate kinase polypeptides that exhibit an improvement in any enzyme property as compared to a reference acetate kinase polypeptide and/or a wild-type acetate kinase polypeptide, and/or another engineered acetate kinase polypeptide. Thus, the level of “improvement” can be determined and compared between various acetate kinase polypeptides, including wild-type, as well as engineered acetate kinases. Improved properties include, but are not limited, to such properties as increased protein expression, increased thermoactivity, increased thermostability, increased pH activity, increased stability, increased enzymatic activity, increased substrate specificity or affinity, increased specific activity, increased resistance to substrate or end-product inhibition, increased chemical stability, improved chemoselectivity, improved solvent stability, increased tolerance to acidic pH, increased tolerance to proteolytic activity (i.e., reduced sensitivity to proteolysis), reduced aggregation, increased solubility, and altered temperature profile. In additional embodiments, the term is used in reference to the at least one improved property of acetate kinase enzymes. In some embodiments, the present invention provides acetate kinase polypeptides that exhibit an improvement in any enzyme property as compared to a reference acetate kinase polypeptide and/or a wild-type acetate kinase polypeptide, and/or another engineered acetate kinase polypeptide. Thus, the level of “improvement” can be determined and compared between various acetate kinase polypeptides, including wild-type, as well as engineered acetate kinases.

[0111] “Increased enzymatic activity” and “enhanced catalytic activity” refer to an improved property of the engineered polypeptides, which can be represented by an increase in specific activity (e.g., product produced/time/weight protein) or an increase in percent conversion of the substrate to the product (e.g., percent conversion of starting amount of substrate to product in a specified time period using a specified amount of enzyme) as compared to the reference enzyme. In some embodiments, the terms refer to an improved property of engineered acetate kinase polypeptides provided herein, which can be represented by an increase in specific activity (e.g., product produced/time/weight protein) or an increase in percent conversion of the substrate to the product (e.g., percent conversion of starting amount of substrate to product in a specified time period using a specified amount of acetate kinase) as compared to the reference acetate kinase enzyme. In some embodiments, the terms are used in reference to improved acetate kinase enzymes provided herein. Exemplary methods to determine enzyme activity of the engineered acetate kinases of the present invention are provided in the Examples. Any property relating to enzyme activity may be affected, including the classical enzyme properties of Kₘ, Vₘₐₓ or k_{cat}, changes of which can lead to increased enzymatic activity. For example, improvements in enzyme activity can be from about 1.1 fold the enzymatic activity of the corresponding wild-type enzyme, to as much as 2-fold, 5-fold, 10-fold, 20-fold, 25-fold, 50-fold, 75-fold, 100-fold, 150-fold, 200-fold or more enzymatic activity than the naturally occurring acetate kinase or another engineered acetate kinase from which the acetate kinase polypeptides were derived.

[0112] “Conversion” refers to the enzymatic conversion (or biotransformation) of a substrate(s) to the corresponding product(s). “Percent conversion” refers to the percent of the substrate that is converted to the product within a period of time under specified conditions. Thus, the “enzymatic activity” or “activity” of an acetate kinase polypeptide can be expressed as “percent conversion” of the substrate to the product in a specific period of time.

[0113] “Stringent hybridization conditions” is used herein to refer to conditions under which nucleic acid hybrids are stable. As known to those of skill in the art, the stability of hybrids is reflected in the melting temperature (Tₘ) of the hybrids. In general, the stability of a hybrid is a function of ion strength, temperature, G/C content, and the presence of chaotropic agents. The Tₘ values for polynucleotides can be calculated using known methods for predicting melting temperatures (See e.g., Baldino et al., Meth. Enzymol., 1989, 168:761-777; Bolton et al., Proc. Natl. Acad. Sci. USA., 1962, 48:1390; Bresslauer et al., Proc. Natl. Acad. Sci. USA, 1986, 83:8893-8897; Freier et al., Proc. Natl. Acad. Sci. USA., 1986, 83:9373-9377; Kierzek et al., Biochem., 1986, 25:7840-7846; Rychlik et al., Nucl. Acids Res., 1990, 18:6409-6412 (erratum, Nucl. Acids Res., 1991, 19:698); Sambrook et al., Molecular Cloning: A Laboratory Manual, Cold Spring Harbor Laboratory Press, New York (2001); Suggs et al., 1981, in Developmental Biology Using Purified Genes, Brown et al. [eds.], pp. 683-693, Academic Press, Cambridge, MA (1981); and Wetmur, Crit. Rev. Biochem. Mol. Biol., 1991, 26:227-259). In some embodiments, the polynucleotide encodes the polypeptide disclosed herein and hybridizes under defined conditions, such as moderately stringent or highly stringent conditions, to the complement of a sequence encoding an engineered acetate kinase enzyme of the present invention.

[0114] “Hybridization stringency” relates to hybridization conditions, such as washing conditions, in the hybridization of nucleic acids. Generally, hybridization reactions are performed under conditions of lower stringency, followed by washes of varying but higher stringency (see, e.g., Sambrook et al., Molecular Cloning: A Laboratory Manual, Cold Spring Harbor Laboratory Press, New York (2001); Ausubel et al., Current Protocols in Molecular Biology, John Wiley & Sons, 2003). The term “moderately stringent hybridization” refers to conditions that permit target-DNA to bind a complementary nucleic acid that has about 60% identity, preferably about 75% identity, about 85% identity to the target DNA, with greater than about 90% identity to target-polynucleotide. Exemplary moderately stringent conditions are conditions equivalent to hybridization in 50% formamide, 5× Denhart's solution, 5×SSPE, 0.2% SDS at 42° C., followed by washing in 0.2×SSPE, 0.2% SDS, at 42° C. “High stringency hybridization” refers generally to conditions that are about 10° C. or less from the thermal melting temperature Tₘ as determined under the solution condition for a defined polynucleotide sequence. In some embodiments, a high stringency condition refers to conditions that permit hybridization of only those nucleic acid sequences that form stable hybrids in 0.018M NaCl at 65° C. (i.e., if a hybrid is not stable in 0.018M NaCl at 65° C., it will not be stable under high stringency conditions, as contemplated herein). High stringency conditions can be provided, for example, by hybridization in conditions equivalent to 50% formamide, 5× Denhart's solution, 5×SSPE, 0.2% SDS at 42° C., followed by washing in 0.1×SSPE, and 0.1% SDS at 65° C. Another high stringency condition is hybridizing in conditions equivalent to hybridizing in 5×SSC containing 0.1% (w/v) SDS at 65° C. and washing in 0.1×SSC containing 0.1% SDS at 65° C. Other high stringency hybridization conditions, as well as moderately stringent conditions, are described in the references cited above.

[0115] “Coding sequence” refers to that portion of a nucleic acid (e.g., a gene) that encodes an amino acid sequence of a protein.

[0116] “Codon optimized” refers to changes in the codons of the polynucleotide encoding a protein to those preferentially used in a particular organism such that the encoded protein is efficiently expressed in the organism of interest. Although the genetic code is degenerate in that most amino acids are represented by several codons, called “synonyms” or “synonymous” codons, it is well known that codon usage by particular organisms is nonrandom and biased towards particular codon triplets. This codon usage bias may be higher in reference to a given gene, genes of common function or ancestral origin, highly expressed proteins versus low copy number proteins, and the aggregate protein coding regions of an organism's genome. In some embodiments, the polynucleotides encoding the acetate kinase enzymes may be codon optimized for optimal production in the host organism selected for expression.

[0117] “Preferred,” “optimal,” and “high codon usage bias” codons when used alone or in combination refer(s) interchangeably to codons that are used at higher frequency in the protein coding regions than other codons that code for the same amino acid. The preferred codons may be determined in relation to codon usage in a single gene, a set of genes of common function or origin, highly expressed genes, the codon frequency in the aggregate protein coding regions of the whole organism, codon frequency in the aggregate protein coding regions of related organisms, or combinations thereof. Codons whose frequency increases with the level of gene expression are typically optimal codons for expression. A variety of methods are known for determining the codon frequency (e.g., codon usage, relative synonymous codon usage) and codon preference in specific organisms, including multivariate analysis, for example, using cluster analysis or correspondence analysis, and the effective number of codons used in a gene (See e.g., GCG CodonPreference, Genetics Computer Group Wisconsin Package; CodonW, Peden, University of Nottingham; McInerney, Bioinform., 1998, 14:372-73; Stenico et al., Nucl. Acids Res., 1994, 222437-46; and Wright, Gene, 1990, 87:23-29). Codon usage tables are available for many different organisms (See e.g., Wada et al., Nucl. Acids Res., 1992, 20:2111-2118; Nakamura et al., Nucl. Acids Res., 2000, 28:292; Duret, et al., supra; Henaut and Danchin, in Escherichia coli and Salmonella, Neidhardt, et al. (eds.), ASM Press, Washington D.C., p. 2047-2066 (1996)). The data source for obtaining codon usage may rely on any available nucleotide sequence capable of coding for a protein. These data sets include nucleic acid sequences actually known to encode expressed proteins (e.g., complete protein coding sequences-CDS), expressed sequence tags (ESTS), or predicted coding regions of genomic sequences (See e.g., Mount, “Bioinformatics: Sequence and Genome Analysis,” Chapter 8, Cold Spring Harbor Laboratory Press, Cold Spring Harbor, N.Y. (2001); Uberbacher, Meth. Enzymol., 1996, 266:259-281; and Tiwari et al., Comput. Appl. Biosci., 1997, 13:263-270).

[0118] “Control sequence” refers herein to include all components, which are necessary or advantageous for the expression of a polynucleotide and/or polypeptide of the present application. Each control sequence may be native or foreign to the nucleic acid sequence encoding the polypeptide. Such control sequences include, but are not limited to, a leader, polyadenylation sequence, pro-peptide sequence, promoter sequence, signal peptide sequence, initiation sequence and transcription terminator. In some embodiments, the control sequences include a promoter, and transcriptional and translational stop signals.

[0119] “Operably linked” or “operatively linked” is defined herein as a configuration in which a control sequence is appropriately placed (i.e., in a functional relationship) at a position relative to a polynucleotide of interest such that the control sequence directs or regulates the expression of the polynucleotide, and where appropriate the encoded polypeptide of interest.

[0120] “Promoter sequence” refers to a nucleic acid sequence that defines and/or initiates expression of a polynucleotide of interest, such as a coding sequence. The promoter sequence contains transcriptional control sequences, which mediate the expression of a polynucleotide of interest. The promoter may be any nucleic acid sequence which shows transcriptional activity in the host cell of choice including mutant, truncated, and hybrid promoters, and may be obtained from genes encoding extracellular or intracellular polypeptides either homologous or heterologous to the host cell.

[0121] “Heterologous” refers to the relationship between two or more nucleic acid or protein sequences (e.g., a promoter sequence, signal peptide, terminator sequence, etc.) that are derived from different sources and are not associated in nature.

[0122] “Vector” refers to a polynucleotide construct for introducing a polynucleotide sequence into a cell. In some embodiments, the vector is an expression vector that is operably linked to a suitable control sequence capable of effecting the expression in a suitable host of the polynucleotide of interest and where appropriate the encoded polypeptide.

[0123] “Expression” includes any step involved in the production of the polypeptide including, but not limited to, transcription, post-transcriptional modification, translation, and post-translational modification. In some embodiments, the term also encompasses secretion of the polypeptide from a cell.

[0124] “Produces” refers to the production of proteins and/or other compounds by cells. It is intended that the term encompass any step involved in the production of polypeptides including, but not limited to, transcription, post-transcriptional modification, translation, and post-translational modification. In some embodiments, the term also encompasses secretion of the polypeptide from a cell.

[0125] “Culturing” refers to the growing of a population of microbial cells under any suitable conditions (e.g., using a liquid, gel or solid medium).

[0126] “Host cell” and “host strain” refer to suitable hosts for expression vectors comprising DNA provided herein (e.g., the polynucleotides encoding the acetate kinase variants). In some embodiments, the host cells are prokaryotic or eukaryotic cells that have been transformed or transfected with vectors constructed using recombinant DNA techniques as known in the art.

[0127] “pH stable” refers to an acetate kinase polypeptide that maintains similar activity (e.g., more than 60% to 80%) after exposure to high or low pH (e.g., 4.5-6 or 8 to 12) for a period of time (e.g., 0.5-24 hrs) compared to the untreated enzyme.

[0128] “Thermostable” refers to an acetate kinase polypeptide that maintains similar activity (more than 60% to 80% for example) after exposure to elevated temperatures (e.g., 40-80° C.) for a period of time (e.g., 0.5-24 h) compared to the wild-type enzyme exposed to the same elevated temperature.

[0129] “Solvent stable” refers to an acetate kinase polypeptide that maintains similar activity (more than e.g., 60% to 80%) after exposure to varying concentrations (e.g., 5-99%) of solvent (ethanol, isopropyl alcohol, dimethylsulfoxide (DMSO), tetrahydrofuran, 2-methyltetrahydrofuran, acetone, toluene, butyl acetate, methyl tert-butyl ether, etc.) for a period of time (e.g., 0.5-24 h) compared to the wild-type enzyme exposed to the same concentration of the same solvent.

[0130] “Thermo- and solvent stable” refers to an acetate kinase polypeptide that is both thermostable and solvent stable.

[0131] “Stereoselectivity” refers to the preferential formation in a chemical or enzymatic reaction of one stereoisomer over another. Stereoselectivity can be partial, where the formation of one stereoisomer is favored over the other, or it may be complete where only one stereoisomer is formed. When the stereoisomers are enantiomers, the stereoselectivity is referred to as enantioselectivity, the fraction (typically reported as a percentage) of one enantiomer in the sum of both. It is commonly alternatively reported in the art (typically as a percentage) as the enantiomeric excess (“e.e.”) calculated therefrom according to the formula [major enantiomer-minor enantiomer]/[major enantiomer+minor enantiomer]. Where the stereoisomers are diastereoisomers, the stereoselectivity is referred to as diastereoselectivity, the fraction (typically reported as a percentage) of one diastereomer in a mixture of two diastereomers, commonly alternatively reported as the diastereomeric excess (“d.e.”). Enantiomeric excess and diastereomeric excess are types of stereomeric excess.

[0132] “Regioselectivity” and “regioselective reaction” refer to a reaction in which one direction of bond making or breaking occurs preferentially over all other possible directions. Reactions can completely (100%) regioselective if the discrimination is complete, substantially regioselective (at least 75%), or partially regioselective (x %, wherein the percentage is set dependent upon the reaction of interest), if the product of reaction at one site predominates over the product of reaction at other sites.

[0133] “Chemoselectivity” refers to the preferential formation in a chemical or enzymatic reaction of one product over another.

[0134] “Suitable reaction conditions” refers to those conditions in the enzymatic conversion reaction solution (e.g., ranges of enzyme loading, substrate loading, temperature, pH, buffers, co-solvents, etc.) under which an acetate kinase polypeptide of the present invention is capable of converting a substrate to the desired product compound. Some exemplary “suitable reaction conditions” are provided herein.

[0135] “Loading,” such as in “compound loading” or “enzyme loading” refers to the concentration or amount of a component in a reaction mixture at the start of the reaction.

[0136] “Substrate” in the context of an enzymatic conversion reaction process refers to the compound or molecule acted on by the engineered enzymes provided herein (e.g., engineered acetate kinase polypeptides).

[0137] “Product” in the context of an enzymatic conversion process refers to the compound or molecule resulting from the action of an enzymatic polypeptide on a substrate.

[0138] “Increasing” yield of a product (e.g., a nucleoside triphosphate or analogue) from a reaction occurs when a particular component present during the reaction (e.g., an acetate kinase enzyme) causes more product to be produced, compared with a reaction conducted under the same conditions with the same substrate and other substituents, but in the absence of the component of interest.

[0139] “Substantially free” of a particular enzyme if the amount of that enzyme compared with other enzymes that participate in catalyzing the reaction is less than about 2%, about 1%, or about 0.1% (wt/wt).

[0140] “Fractionating” a liquid (e.g., a culture broth) means applying a separation process (e.g., salt precipitation, column chromatography, size exclusion, and filtration) or a combination of such processes to provide a solution in which a desired protein comprises a greater percentage of total protein in the solution than in the initial liquid product.

[0141] “Alkyl” refers to saturated hydrocarbon groups of from 1 to 18 carbon atoms inclusively, either straight chained or branched, more preferably from 1 to 8 carbon atoms inclusively, and most preferably 1 to 6 carbon atoms inclusively. An alkyl with a specified number of carbon atoms is denoted in parenthesis (e.g., (C₁-C₄)alkyl refers to an alkyl of 1 to 4 carbon atoms).

[0142] “Alkenyl” refers to groups of from 2 to 12 carbon atoms inclusively, either straight or branched containing at least one double bond but optionally containing more than one double bond.

[0143] “Alkynyl” refers to groups of from 2 to 12 carbon atoms inclusively, either straight or branched containing at least one triple bond but optionally containing more than one triple bond, and additionally optionally containing one or more double bonded moieties.

[0144] “Heteroalkyl, “heteroalkenyl,” and heteroalkynyl,” refer to alkyl, alkenyl and alkynyl as defined herein in which one or more of the carbon atoms are each independently replaced with the same or different heteroatoms or heteroatomic groups. Heteroatoms and/or heteroatomic groups which can replace the carbon atoms include, but are not limited to, —O—, —S—, —S—O—, —NR′—, —PH—, —S(O)—, —S(O)₂—, —S(O)NR′—, —S(O)₂NR′—, and the like, including combinations thereof, where each Ra is independently selected from hydrogen, alkyl, heteroalkyl, cycloalkyl, heterocycloalkyl, aryl, and heteroaryl.

[0145] “Alkoxy” refers to the group —OR′ wherein R′ is an alkyl group is as defined above including optionally substituted alkyl groups as also defined herein.

[0146] “Amino” refers to the group —NH_{I}. Substituted amino refers to the group —NHR′, NR′R′, and NR′R′R′, where each R′ is independently selected from substituted or unsubstituted alkyl, cycloalkyl, cycloheteroalkyl, alkoxy, aryl, heteroaryl, heteroarylalkyl, acyl, alkoxycarbonyl, sulfanyl, sulfinyl, sulfonyl, and the like. Typical amino groups include, but are limited to, dimethylamino, diethylamino, trimethylammonium, triethylammonium, methylysulfonylamino, furanyl-oxy-sulfamino, and the like. “Oxo” refers to ═O.

[0147] “Oxy” refers to a divalent group —O—, which may have various substituents to form different oxy groups, including ethers and esters.

[0148] “Carboxy” refers to —COOH.

[0149] “Carbonyl” refers to —C(O)—, which may have a variety of substituents to form different carbonyl groups including acids, acid halides, aldehydes, amides, esters, and ketones.

[0150] “Alkyloxycarbonyl” refers to —C(O) OR′, where R′ is an alkyl group as defined herein, which can be optionally substituted.

[0151] As used herein, “aminocarbonyl” refers to —C(O)NH₂. Substituted aminocarbonyl refers to —C(O)NR′R′, where the amino group NR′R′ is as defined herein.

[0152] “Halogen” and “halo” refer to fluoro, chloro, bromo and iodo.

[0153] “Hydroxy” refers to —OH.

[0154] “Cyano” refers to —CN.

[0155] “Aryl” refers to an unsaturated aromatic carbocyclic group of from 6 to 12 carbon atoms inclusively having a single ring (e.g., phenyl) or multiple condensed rings (e.g., naphthyl or anthryl). Exemplary aryls include phenyl, pyridyl, naphthyl and the like.

[0156] “Heterocycle,” “heterocyclic,” and interchangeably “heterocycloalkyl,” refer to a saturated or unsaturated group having a single ring or multiple condensed rings, from 2 to 10 carbon ring atoms inclusively and from 1 to 4 hetero ring atoms inclusively selected from nitrogen, sulfur or oxygen within the ring. Such heterocyclic groups can have a single ring (e.g., piperidinyl or tetrahydrofuryl) or multiple condensed rings (e.g., indolinyl, dihydrobenzofuran or quinuclidinyl). Examples of heterocycles include, but are not limited to, furan, thiophene, thiazole, oxazole, pyrrole, imidazole, pyrazole, pyridine, pyrazine, pyrimidine, pyridazine, indolizine, isoindole, indole, indazole, purine, quinolizine, isoquinoline, quinoline, phthalazine, naphthylpyridine, quinoxaline, quinazoline, cinnoline, pteridine, carbazole, carboline, phenanthridine, acridine, phenanthroline, isothiazole, phenazine, isoxazole, phenoxazine, phenothiazine, imidazolidine, imidazoline, piperidine, piperazine, pyrrolidine, indoline and the like.

[0157] “Heteroaryl” refers to an aromatic heterocyclic group of from 1 to 10 carbon atoms inclusively and 1 to 4 heteroatoms inclusively selected from oxygen, nitrogen and sulfur within the ring. Such heteroaryl groups can have a single ring (e.g., pyridyl or furyl) or multiple condensed rings (e.g., indolizinyl or benzothienyl).

[0158] “Heteroarylalkyl” refers to an alkyl substituted with a heteroaryl (i.e., heteroaryl-alkyl- groups), preferably having from 1 to 6 carbon atoms inclusively in the alkyl moiety and from 5 to 12 ring atoms inclusively in the heteroaryl moiety. Such heteroarylalkyl groups are exemplified by pyridylmethyl and the like.

[0159] “Heteroarylalkenyl” refers to an alkenyl substituted with a heteroaryl (i.e., heteroaryl-alkenyl- groups), preferably having from 2 to 6 carbon atoms inclusively in the alkenyl moiety and from 5 to 12 ring atoms inclusively in the heteroaryl moiety.

[0160] “Heteroarylalkynyl” refers to an alkynyl substituted with a heteroaryl (i.e., heteroaryl-alkynyl- groups), preferably having from 2 to 6 carbon atoms inclusively in the alkynyl moiety and from 5 to 12 ring atoms inclusively in the heteroaryl moiety.

[0161] “Membered ring” is meant to embrace any cyclic structure. The number preceding the term “membered” denotes the number of skeletal atoms that constitute the ring. Thus, for example, cyclohexyl, pyridine, pyran and thiopyran are 6-membered rings and cyclopentyl, pyrrole, furan, and thiophene are 5-membered rings.

[0162] “Phosphate” as used herein refers to a functional group comprised of an orthophosphate ion (phosphorous atom covalently linked to four oxygen atoms). The orthophosphate ion is commonly found with one or more hydrogen atoms or organic groups. A phosphate group or chain may be modified, as further described herein.

[0163] “Phosphorylated” as used herein refers to the addition or presence of one of more phosphoryl groups (phosphorous atom covalently linked to the three oxygen atoms).

[0164] “Thiophosphate” refers to an instance where a non-bridging oxygen in a phosphate group of a phosphodiester bond, NMP, NDP, NTP or NQP is replaced with a sulfur. In some embodiments, nucleoside 5′-thiomonophosphate is referred to as NMP-S. In some embodiments, nucleoside-5′-1-thio(diphosphate) and nucleoside-5′-1-thio(triphosphate) are referred to as NDPαS or αS-NDP, and NTPαS or αS-NTP, respectively. In some embodiments, nucleoside-5′-2-thio(diphosphate) and nucleoside-5′-2-thio(triphosphate) are referred to as NDPβS and NTPβS, respectively.

[0165] “Dithiophosphate” refers to an instance where two non-bridging oxygens in a phosphate group of a phosphodiester bond, NMP, NDP, NTP or NQP are replaced with two sulfurs.

[0166] Unless otherwise specified, positions occupied by hydrogen in the foregoing groups can be further substituted with substituents exemplified by, but not limited to, hydroxy, oxo, nitro, methoxy, ethoxy, alkoxy, substituted alkoxy, trifluoromethoxy, haloalkoxy, fluoro, chloro, bromo, iodo, halo, methyl, ethyl, propyl, butyl, alkyl, alkenyl, alkynyl, substituted alkyl, trifluoromethyl, haloalkyl, hydroxyalkyl, alkoxyalkyl, thio, alkylthio, acyl, carboxy, alkoxycarbonyl, carboxamido, substituted carboxamido, alkylsulfonyl, alkylsulfinyl, alkylsulfonylamino, sulfonamido, substituted sulfonamido, cyano, amino, substituted amino, alkylamino, dialkylamino, aminoalkyl, acylamino, amidino, amidoximo, hydroxamoyl, phenyl, aryl, substituted aryl, aryloxy, arylalkyl, arylalkenyl, arylalkynyl, pyridyl, imidazolyl, heteroaryl, substituted heteroaryl, heteroaryloxy, heteroarylalkyl, heteroarylalkenyl, heteroarylalkynyl, cyclopropyl, cyclobutyl, cyclopentyl, cyclohexyl, cycloalkyl, cycloalkenyl, cycloalkylalkyl, substituted cycloalkyl, cycloalkyloxy, pyrrolidinyl, piperidinyl, morpholino, heterocycle, (heterocycle)oxy, and (heterocycle)alkyl; and preferred heteroatoms are oxygen, nitrogen, and sulfur. It is understood that where open valences exist on these substituents they can be further substituted with alkyl, cycloalkyl, aryl, heteroaryl, and/or heterocycle groups, that where these open valences exist on carbon they can be further substituted by halogen and by oxygen-, nitrogen-, or sulfur-bonded substituents, and where multiple such open valences exist, these groups can be joined to form a ring, either by direct formation of a bond or by formation of bonds to a new heteroatom, preferably oxygen, nitrogen, or sulfur. It is further understood that the above substitutions can be made provided that replacing the hydrogen with the substituent does not introduce unacceptable instability to the molecules of the present invention, and is otherwise chemically reasonable.

[0167] “Optional” and “optionally” mean that the subsequently described event or circumstance may or may not occur, and that the description includes instances where the event or circumstance occurs and instances in which it does not. One of ordinary skill in the art would understand that with respect to any molecule described as containing one or more optional substituents, only sterically practical and/or synthetically feasible compounds are meant to be included.

[0168] “Optionally substituted” refers to all subsequent modifiers in a term or series of chemical groups. For example, in the term “optionally substituted arylalkyl, the “alkyl” portion and the “aryl” portion of the molecule may or may not be substituted, and for the series “optionally substituted alkyl, cycloalkyl, aryl and heteroaryl,” the alkyl, cycloalkyl, aryl, and heteroaryl groups, independently of the others, may or may not be substituted.

### Engineered Acetate Kinase Polypeptides

[0169] The present disclosure provides engineered acetate kinase polypeptides, polynucleotides encoding the polypeptides, methods of preparing the polypeptides, and methods for using the polypeptides. In some embodiments, the acetate kinase has acetate kinase activity and is engineered to have one or more improved properties, including among others, increased activity, increased stability, and increased substrate range, including activity on modified nucleoside diphosphate substrates.

[0170] In one aspect, the present disclosure provides an engineered acetate kinase comprising an amino acid sequence having at least 70%, 75%, 80%, 81%, 82%, 83%, 84%, 85%, 86%, 87%, 88%, 89%, 90%, 91%, 92%, 93%, 94%, 95%, 96%, 97%, 98%, 99%, or more sequence identity to a reference sequence corresponding to amino acid residues 12-417 of an even-numbered SEQ ID NO. of SEQ ID NOs: 4, 14-566, 612-868, 894-924, and 940-1390, or to a reference sequence corresponding to an even-numbered SEQ ID NO. of SEQ ID NOs: 4, 14-566, 612-868, 894-924, and 940-1390, wherein the amino acid sequence comprises one or more substitutions relative to the reference sequence corresponding to amino acid residues 12-417 of SEQ ID NO: 4, 254, 396, 620, 846, 1240, or 1250, or relative to the reference sequence corresponding to SEQ ID NO: 4, 254, 396, 620, 846, 1240, or 1250.

[0171] In some embodiments, the engineered acetate kinase comprises an amino acid sequence having at least 70%, 75%, 80%, 81%, 82%, 83%, 84%, 85%, 86%, 87%, 88%, 89%, 90%, 91%, 92%, 93%, 94%, 95%, 96%, 97%, 98%, 99%, or more sequence identity to a reference sequence corresponding to amino acid residues 12-417 of SEQ ID NO: 4, 254, 396, 620, 846, 1240, or 1250, or to a reference sequence corresponding to SEQ ID NO: 4, 254, 396, 620, 846, 1240, or 1250, wherein the amino acid sequence comprises one or more substitutions relative to the reference sequence corresponding to amino acid residues 12-417 of SEQ ID NO: 4, 254, 396, 620, 846, 1240, or 1250, or relative to the reference sequence corresponding to SEQ ID NO: 4, 254, 396, 620, 846, 1240, or 1250.

[0172] In some embodiments, the engineered acetate kinase comprises an amino acid sequence having at least 70%, 75%, 80%, 81%, 82%, 83%, 84%, 85%, 86%, 87%, 88%, 89%, 90%, 91%, 92%, 93%, 94%, 95%, 96%, 97%, 98%, 99%, or more sequence identity to the reference sequence corresponding to amino acid residues 12-417 of SEQ ID NO: 4, or to the reference sequence corresponding to SEQ ID NO: 4, wherein the amino acid sequence comprises one or more substitutions relative to the reference sequence corresponding to amino acid residues 12-417 of SEQ ID NO: 4, or relative to the reference sequence corresponding to SEQ ID NO: 4.

[0173] In some embodiments, the engineered acetate kinase comprises an amino acid sequence having at least 70%, 75%, 80%, 81%, 82%, 83%, 84%, 85%, 86%, 87%, 88%, 89%, 90%, 91%, 92%, 93%, 94%, 95%, 96%, 97%, 98%, 99%, or more sequence identity to the reference sequence corresponding to amino acid residues 12-417 of SEQ ID NO: 254, 396, 620, 846, 1240, or 1250, or to the reference sequence corresponding to SEQ ID NO: 254, 396, 620, 846, 1240, or 1250, wherein the amino acid sequence comprises one or more substitutions relative to the reference sequence corresponding to amino acid residues 12-417 of SEQ ID NO: 4, or relative to the reference sequence corresponding to SEQ ID NO: 4.

[0174] In some embodiments, the engineered acetate kinase comprises an amino acid sequence having at least 70%, 75%, 80%, 81%, 82%, 83%, 84%, 85%, 86%, 87%, 88%, 89%, 90%, 91%, 92%, 93%, 94%, 95%, 96%, 97%, 98%, 99%, or more sequence identity to a reference sequence corresponding to amino acid residues 12-417 of an even-numbered SEQ ID NO. of SEQ ID NOs: 14-566, 612-868, 894-924, and 940-1390, or to a reference sequence corresponding to an even-numbered SEQ ID NO. of SEQ ID NOs: 14-566, 612-868, 894-924, and 940-1390, wherein the amino acid sequence comprises one or more substitutions relative to the reference sequence corresponding to amino acid residues 12-417 of SEQ ID NO: 4, or relative to the reference sequence corresponding to SEQ ID NO: 4.

[0175] In some embodiments, the amino acid sequence of the engineered acetate kinase comprises at least a substitution at amino acid position 4, 5, 10, 11, 13, 14, 15, 16, 18, 19, 22, 26, 27, 28, 30, 31, 32, 36, 38, 41, 43, 46, 49, 50, 52, 54, 55, 60, 61, 62, 63, 64, 65, 66, 68, 69, 72, 74, 75, 76, 77, 79, 80, 87, 88, 91, 97, 98, 107, 113, 114, 110, 115, 116, 117, 118, 119, 120, 121, 123, 126, 127, 128, 130, 133, 134, 135, 136, 137, 138, 139, 141, 142, 143, 144, 145, 146, 147, 148, 149, 150, 151, 152, 156, 157, 160, 163, 165, 167, 170, 176, 180, 182, 183, 189, 190, 192, 196, 199, 201, 204, 205, 207, 208, 209, 210, 211, 212, 213, 216, 217, 223, 225, 227, 229, 231, 238, 240, 242, 246, 248, 249, 251, 257, 258, 260, 261, 263, 264, 265, 266, 268, 269, 270, 273, 276, 277, 279, 280, 284, 285, 288, 291, 292, 293, 295, 297, 298, 299, 300, 301, 302, 303, 304, 306, 308, 309, 310, 311, 312, 313, 314, 315, 316, 317, 318, 320, 323, 324, 329, 339, 340, 343, 344, 345, 347, 348, 349, 350, 352, 353, 354, 355, 356, 358, 360, 361, 363, 364, 369, 370, 372, 373, 374, 375, 376, 383, 384, 385, 387, 390, 391, 392, 393, 394, 395, 398, 400, 402, 404, 405, 406, 407, 408, or 409, or combinations thereof, wherein the amino acid positions are relative to the reference sequence corresponding to amino acid residues 12-417 of SEQ ID NO: 4, or relative to the reference sequence corresponding to SEQ ID NO: 4.

[0176] In some embodiments, the amino acid sequence of the engineered acetate kinase comprises at least a substitution or amino acid residue 4Y, 5N, 10I, 11D, 13S, 14E/M/S, 15G/I/T, 16N/S, 18A, 19C/G/L/P/Q, 22H/R/Y, 26G, 27G/L, 28I/W, 30S, 31E/F/R/W, 32A/R/S, 36A, 38F/L/M/R/Y, 41M, 43A, 46L/Q, 49A/R, 50C/T, 52L, 54A/L/P/V, 55E/F/L/M/S/T/V, 60A/G/P/S/T, 61K/S, 62T, 63M, 64A/K/L/Q/R/V, 65A/I/R/S, 66A/G/R, 68A/G/P/Q, 69D, 72V, 74I/S, 75F/H/L/V/W, 76G/S, 77G/H, 79E/K, 80I/M/S, 87R, 88L/N/P, 91L, 97V, 98G/M/W, 107L, 113M, 114L/Q/S/T/V, 110K, 115G/Q/S/T/Y, 116M, 117M, 118H/P, 119L/M, 120S, 121G, 123V, 126C, 127L, 128W, 130I, 133G, 134L/Q, 135A/L/V, 136I/K/L/M/R/V, 137A/F/I, 138L/V, 139E/L/R, 141C/R/W/Y, 142F/W, 143G/N, 144A/C/I/T, 145C/D, 146E, 147C/E/G/K/M/V/Y, 148M, 149C, 150T, 151A, 152I, 156A/K/M/R/S, 157L, 160C, 163R, 165A, 167G, 170L, 176V, 180R/T, 182R, 183L/N, 189M, 190Q, 192C/V, 196L/R, 199L, 201Q/W, 204P, 205L/R, 207D/L/T, 208Q, 209K/L/R, 210E/P/V/W, 211M/V, 212T/Y, 213S, 216G/L/S, 217C/L/M/P/W, 223G/T, 225G/H/I/L, 227S, 229L/S/T, 231P, 238Q, 240G, 242V, 246P, 248G, 249A, 251D, 257V/W, 258Y, 260F, 261R/S, 263C, 264V, 265L, 266I/R/Y, 268Q, 269V, 270T, 273H/S/T, 276S/W, 277A/S, 279L/S/W, 280R, 284T, 285L/P/Q/R/V, 288I/L/N, 291G/N/P/R/S/T/W, 292A/G/Q/T/Y, 293M/R, 295I/L, 297L/N/P, 298L/T, 299F/I/L/M/S/T/V, 300A/F/I/L/M/N/Q/R/S/W/Y, 301A/C/D/F/H/K/M/R/S, 302C, 303K/M/R, 304I/P/Q/S/W, 306R, 308A/L, 309A/F/H/M/P/R, 310L, 311V, 312G, 313L, 314G/S/V/W, 315I, 316E/H/M/R, 317A/F/G/I/L/Q/R/S/T/V/W/Y, 318P, 320G/W, 323P, 324L, 329V, 339V, 340P, 343F, 344C/L, 345N, 347G/P/R, 348H/L/R/S/V, 349C, 350A/C/L/V, 352H/M/R/S/W/Y, 353I/R/V, 354C/L/S, 355P, 356S, 358G, 360R, 361P, 363A/V, 364L, 369N, 370H/L/M/T, 372G/L/P/R/S/Y, 373P/T/V, 374A/C/E/Q/R/W, 375A/T/V/Y, 376R/S/Y, 391G/P/Q/R, 383R, 384K, 385E/V, 387T, 390G, 392I/P, 393F/H/L/Q/S, 394H, 395A/Q, 398Y, 400P, 402E/M, 404L/M, 405D, 406I/L, 407L/M/R, 408V, or 409A, or combinations thereof, wherein the amino acid positions are relative to the reference sequence corresponding to amino acid residues 12-417 of SEQ ID NO: 4, or relative to the reference sequence corresponding to SEQ ID NO: 4.

[0177] In some embodiments, the amino acid sequence of the engineered acetate kinase comprises at least a substitution or amino acid residue H4Y, H5N, S10I, G11D, K13S, V14E/M/S, L15G/I/T, V16N/S, N18A, S19C/G/L/P/Q, S22H/R/Y, Y26G, Q27G/L, L28I/W, D30S, M31E/F/R/W, T32A/R/S, V36A, A38F/L/M/R/Y, L41M, E43A, G46L/Q, G49A/R, S50C/T, I52L, H54A/L/P/V, K55E/F/L/M/S/T/V, K60A/G/P/S/T, H61K/S, V62T, L63M, E64A/K/L/Q/R/V, H65A/I/R/S, E66A/G/R, K68A/G/P/Q, N69D, I72V, L74I/S, K75F/H/L/V/W, L76G/S, V77G/H, D79E/K, L80I/M/S, G87R, V88L/N/P, D91L, A97V, V98G/M/W, E107L, V113M, K114L/Q/S/T/V, A110K, I115G/Q/S/T/Y, T116M, D117M, E118H/P, V119L/M, L120S, K121G, I123V, L126C, S127L, F128W, A130I, H133G, N134L/Q, P135A/L/V, A136I/K/L/M/R/V, N137A/F/I, I138L/V, M139E/L/R, I141C/R/W/Y, K142F/W, S143G/N, S144A/C/I/T, M145C/D, K146E, L147C/E/G/K/M/V/Y, L148M, P149C, G150T, V151A, P152I, V156A/K/M/R/S, F157L, A160C, Q163R, M165A, E167G, Y170L, Y176V, E180R/T, Y182R, K183L/N, F189M, H190Q, T192C/V, Y196L/R, K199L, A201Q/W, I204P, M205L/R, K207D/L/T, P208Q, Y209K/L/R, D210E/P/V/W, Q211M/V, L212T/Y, K213S, T216G/L/S, V217C/L/M/P/W, A223G/T, V225G/H/I/L, A227S, K229L/S/T, G231P, M238Q, F240G, P242V, L246P, M248G, G249A, R251D, P257V/W, A258Y, V260F, E261R/S, L263C, E264V, K265L, E266I/R/Y, G268Q, L269V, S270T, E273H/S/T, N276S/W, 1277A/S, N279L/S/W, K280R, V284T, Y285L/P/Q/R/V, T288I/L/N, F291G/N/P/R/S/T/W, S292A/G/Q/T/Y, S293M/R, M295I/L, D297L/N/P, I298L/T, E299F/I/L/M/S/T/V, D300A/F/I/L/M/N/Q/R/S/W/Y, N301A/C/D/F/H/K/M/R/S, A302C, I303K/M/R, E304I/P/Q/S/W, D306R, V308A/L, C309A/F/H/M/P/R, R310L, L311V, A312G, F313L, D314G/S/V/W, V315I, Y316E/H/M/R, E317A/F/G/I/L/Q/R/S/T/V/W/Y, Y318P, I320G/W, Y323P, I324L, A329V, F339V, T340P, V343F, G344C/L, E345N, S347G/P/R, P348H/L/R/S/V, 1349C, M350A/C/L/V, E352H/M/R/S/W/Y, E353I/R/V, I354C/L/S, 1355P, E356S, Y358G, G360R, Y361P, G363A/V, I364L, E369N, A370H/L/M/T, D372G/L/P/R/S/Y, F373P/T/V, K374A/C/E/Q/R/W, G375A/T/V/Y, E376R/S/Y, P383R, D384K, S385E/V, V387T, M390G, V391G/P/Q/R, V392I, P393F/H/L/Q/S, T394H, N395A/Q, L398Y, I400P, K402E/M, T404L/M, K405D, E406I/L, I407L/M/R, 1408V, or E409A, or combinations thereof, wherein the amino acid positions are relative to the reference sequence corresponding to amino acid residues 12-417 of SEQ ID NO: 4, or relative to the reference sequence corresponding to SEQ ID NO: 4.

[0178] In some embodiments, the amino acid sequence of the engineered acetate kinase comprises at least a substitution at amino acid position 32, 54, 88, 147, 209, 277, 279, 293, 299, 313, or 344, or combinations thereof, wherein the amino acid positions are relative to the reference sequence corresponding to amino acid residues 12-417 of SEQ ID NO: 4, or relative to the reference sequence corresponding to SEQ ID NO: 4.

[0179] In some embodiments, the amino acid sequence of the engineered acetate kinase comprises at least a substitution or amino acid residue 32A/R/S, 54A/L/P/V, 88L/N/P, 147C/E/G/K/M/V/Y, 209K/L/R, 277A/S, 279L/S/W, 293M/R, 299F/I/L/M/S/T/V, 313G/S/V/W, or 344C/L, or combinations thereof, wherein the amino acid positions are relative to the reference sequence corresponding to amino acid residues 12-417 of SEQ ID NO: 4, or relative to the reference sequence corresponding to SEQ ID NO: 4.

[0180] In some embodiments, the amino acid sequence of the engineered acetate kinase comprises at least a substitution or amino acid residue 32R, 54L, 88P, 147V, 209L, 277A, 279W, 293R, 299V, 313L, 344L, or combinations thereof, wherein the amino acid positions are relative to the reference sequence corresponding to amino acid residues 12-417 of SEQ ID NO: 4, or relative to the reference sequence corresponding to SEQ ID NO: 4.

[0181] In some embodiments, the amino acid sequence of the engineered acetate kinase comprises at least a substitution or amino acid residue T32R, H54L, V88P, L147V, Y209L, 1277A, N279W, S293R, E299V, F313L, or G344L, or combinations thereof, wherein the amino acid positions are relative to the reference sequence corresponding to amino acid residues 12-417 of SEQ ID NO: 4, or relative to the reference sequence corresponding to SEQ ID NO: 4.

[0182] In some embodiments, the amino acid sequence of the engineered acetate kinase comprises at least a substitution set at amino acid positions 147/313, wherein the amino acid positions are relative to the reference sequence corresponding to amino acid residues 12-417 of SEQ ID NO: 4, or relative to the reference sequence corresponding to SEQ ID NO: 4. In some embodiments, the amino acid sequence of the engineered acetate kinase comprises at least a substitution set, or amino acid residues 147V/313L, wherein the amino acid positions are relative to the reference sequence corresponding to amino acid residues 12-417 of SEQ ID NO: 4, or relative to the reference sequence corresponding to SEQ ID NO: 4. In some embodiments, the amino acid sequence of the engineered acetate kinase comprises at least a substitution set L147V/F313L, wherein the amino acid positions are relative to the reference sequence corresponding to amino acid residues 12-417 of SEQ ID NO: 4, or relative to the reference sequence corresponding to SEQ ID NO: 4.

[0183] In some embodiments, the amino acid sequence of the engineered acetate kinase comprises at least a substitution set at amino acid positions 279/293, wherein the amino acid positions are relative to the reference sequence corresponding to amino acid residues 12-417 of SEQ ID NO: 4, or relative to the reference sequence corresponding to SEQ ID NO: 4. In some embodiments, the amino acid sequence of the engineered acetate kinase comprises at least a substitution set, or amino acid residues 279W/293R, wherein the amino acid positions are relative to the reference sequence corresponding to amino acid residues 12-417 of SEQ ID NO: 4, or relative to the reference sequence corresponding to SEQ ID NO: 4. In some embodiments, the amino acid sequence of the engineered acetate kinase comprises at least a substitution set N279W/S293R, wherein the amino acid positions are relative to the reference sequence corresponding to amino acid residues 12-417 of SEQ ID NO: 4, or relative to the reference sequence corresponding to SEQ ID NO: 4.

[0184] In some embodiments, the amino acid sequence of the engineered acetate kinase comprises at least a substitution set at amino acid positions 147/299/313/344, wherein the amino acid positions are relative to the reference sequence corresponding to amino acid residues 12-417 of SEQ ID NO: 4, or relative to the reference sequence corresponding to SEQ ID NO: 4. In some embodiments, the amino acid sequence of the engineered acetate kinase comprises at least a substitution set, or amino acid residues 147V/299V/313L/344L, wherein the amino acid positions are relative to the reference sequence corresponding to amino acid residues 12-417 of SEQ ID NO: 4, or relative to the reference sequence corresponding to SEQ ID NO: 4. In some embodiments, the amino acid sequence of the engineered acetate kinase comprises at least a substitution set L147V/E299V/F313L/G344L, wherein the amino acid positions are relative to the reference sequence corresponding to amino acid residues 12-417 of SEQ ID NO: 4, or relative to the reference sequence corresponding to SEQ ID NO: 4.

[0185] In some embodiments, the amino acid sequence of the engineered acetate kinase comprises at least a substitution set at amino acid positions 32/54/88/209/277/279/293, wherein the amino acid positions are relative to the reference sequence corresponding to amino acid residues 12-417 of SEQ ID NO: 4, or relative to the reference sequence corresponding to SEQ ID NO: 4. In some embodiments, the amino acid sequence of the engineered acetate kinase comprises at least a substitution set, or amino acid residues 32R/54L/88P/209L/277A/279W/293R, wherein the amino acid positions are relative to the reference sequence corresponding to amino acid residues 12-417 of SEQ ID NO: 4, or relative to the reference sequence corresponding to SEQ ID NO: 4. In some embodiments, the amino acid sequence of the engineered acetate kinase comprises at least a substitution set T32R/H54L/V88P/Y209L/I277A/N279W/S293R, wherein the amino acid positions are relative to the reference sequence corresponding to amino acid residues 12-417 of SEQ ID NO: 4, or relative to the reference sequence corresponding to SEQ ID NO: 4.

[0186] In some embodiments, the amino acid sequence of the engineered acetate kinase comprises at least a substitution or substitution set at amino acid position(s) 98, 404, 137/144, 77, 75, 115, 136, 147, 147/308, 15, 141, 146, 120/135, 160, 217, 135, 148, 301, 130, 11/50, 156, 16, 144/145, 348, 144, 26, 66, 138, 49, 157, 196, 270, 170, 142, 41/97, 369, 74, 52, 352, 373, 27, 280, 137, 126, 285, 19, 46, 276, 145, 205, 313, 348, 372, 69, 68, 392, 72, 50, 69/148/348/372/392, 52/69/148/348/392, 52/148/348/372, 147/205/313/373/408, 69/148/348/392, 52/348/372, 69/148/348, 52/136/348/372, 148/348, 348/372/392, 52/348/392, 136/348, 348/372, 69/136/348, 136/313/352/373/408, 147/313/352/408, 52/148/348, 148/348/372, 52/136/348, 52/69/348/372/392, 348/392, 147/313, 69/148/372/392, 136/148/348/392, 136/372, 69/348/392, 147/205, 69/136/372/392, 69/136/372, 147/205/352, 148/372, 52/69/348/372, 52/69/348, 136/373, 68/136/313/408, 136/205/313/352/408, 147/352/408, 52/148/372, 205/313/352, 313/352/408, 143/313/408, 136/352/373, 147/352, 68/313, 136/205/408, 68/136/408, 313/408, 69/148, 52/372/392, 148/392, 5/52/69/372/392, 136/348/392, 136/313/352, 136/313, 52/148, 372/392, 52/69/372, 136/205/313, 205/208/313, 136/352/408, 205/313, 52/136, 313/352, 136/148/348, 136/408, 136/392, 68/136, 136/205, 69/136, 52/136/372/392, 52/148/392, 68/136/205/352, 205/352/373/408, 69/392, 136/205/352, 205/408, 205/352/408, 408, 52/69, 52/69/392, 69/136/348/372, 69/136/148/392, 68/352/373/408, 68/352, 52/392, 136/147/205/373/408, or 205/352, wherein the amino acid positions are relative to the reference sequence corresponding to amino acid residues 12-417 of SEQ ID NO: 4, or relative to the reference sequence corresponding to SEQ ID NO: 4.

[0187] In some embodiments, the amino acid sequence of the engineered acetate kinase comprises at least a substitution or substitution set, or amino acid residue(s) 98W, 404M, 137F/144I, 98M, 77G, 75F, 115S, 75W, 136I, 147V, 147E, 147K/308A, 15G, 75L, 141Y, 146E, 136V, 120S/135L, 160C, 217C, 135A, 148M, 301A, 130I, 15T, 11D/50T, 156R, 16N, 144T/145C, 348V, 98G, 144C, 75H, 26G, 66G, 138L, 49R, 66R, 157L, 156M, 147G, 115Y, 136K, 196L, 75V, 270T, 141C, 170L, 147Y, 142W, 147M, 41M/97V, 369N, 74I, 52L, 352S, 373V, 27L, 115T, 136R, 135V, 280R, 137I, 126C, 404L, 285L, 141R, 19C, 137A, 136M, 46L, 142F, 15I, 276S, 145D, 115G, 46Q, 205L, 77H, V77H, 141W, 115Q, 156K, 348S, 313L, 348R, 372R, 147C, 352H, 136L, 69D, 68P, 392I, 72V, 50C, 66A, 156S, 276W, 156A, 69D/148M/348S/372R/392I, 52L/69D/148M/348S/392I, 52L/148M/348S/372R, 147V/205L/313L/373V/408V, 69D/148M/348S/392I, 52L/348S/372R, 69D/148M/348S, 52L/136L/348S/372R, 148M/348S, 348S/372R/392I, 52L/348S/392I, 136L/348S, 348S/372R, 69D/136L/348S, 136V/313L/352H/373V/408V, 147V/313L/352H/408V, 52L/148M/348S, 148M/348R/372R, 148M/348R, 52L/136L/348S, 52L/69D/348R/372R/392I, 348S/392I, 147V/313L, 69D/148M/372R/392I, 136L/148M/348S/392I, 136L/372R, 348R/392I, 69D/348R/392I, 147V/205L, 69D/136L/372R/392I, 69D/136L/372R, 147V/205L/352H, 148M/372R, 52L/69D/348R/372R, 52L/69D/348R, 136V/373V, 68P/136V/313L/408V, 136V/205L/313L/352H/408V, 147V/352H/408V, 52L/148M/372R, 205L/313L/352H, 313L/352H/408V, 143N/313L/408V, 136V/352H/373V, 147V/352H, 68P/313L, 136V/205L/408V, 68P/136V/408V, 313L/408V, 69D/148M, 52L/372R/392I, 148M/392I, 5N/52L/69D/372R/392I, 69D/136L/348R, 136L/348R/392I, 136V/313L/352H, 52L/148M/348R, 136V/313L, 52L/148M, 372R/392I, 52L/69D/372R, 136V/205L/313L, 205L/208Q/313L, 136V/352H/408V, 205L/313L, 52L/136L, 313L/352H, 136L/148M/348R, 136V/408V, 136L/392I, 68P/136V, 136V/205L, 69D/136L, 52L/348R/372R, 52L/136L/372R/392I, 52L/148M/392I, 68P/136V/205L/352H, 205L/352H/373V/408V, 69D/392I, 136V/205L/352H, 205L/408V, 205L/352H/408V, 408V, 52L/136L/348R, 52L/69D, 52L/69D/392I, 69D/136L/348R/372R, 69D/136L/148M/392I, 68P/352H/373V/408V, 68P/352H, 52L/392I, 136V/147V/205L/373V/408V, or 205L/352H, wherein the amino acid positions are relative to the reference sequence corresponding to amino acid residues 12-417 of SEQ ID NO: 4, or relative to the reference sequence corresponding to SEQ ID NO: 4.

[0188] In some embodiments, the amino acid sequence of the engineered acetate kinase comprises at least a substitution or substitution set, or amino acid residue(s) V98W, T404M, N137F/S144I, V98M, V77G, K75F, I115S, K75W, A136I, L147V, L147E, L147K/V308A, L15G, K75L, I141Y, K146E, A136V, L120S/P135L, A160C, V217C, P135A, L148M, N301A, A130I, L15T, G11D/S50T, V156R, V16N, S144T/M145C, P348V, V98G, S144C, K75H, Y26G, E66G, I138L, G49R, E66R, F157L, V156M, L147G, I115Y, A136K, Y196L, K75V, S270T, I141C, Y170L, L147Y, K142W, L147M, L41M/A97V, E369N, L74I, I52L, E352S, F373V, Q27L, I115T, A136R, P135V, K280R, N137I, L126C, T404L, Y285L, I141R, S19C, N137A, A136M, G46L, K142F, L15I, N276S, M145D, I115G, G46Q, M205L, V77H, I141W, 1115Q, V156K, P348S, F313L, P348R, D372R, L147C, E352H, A136L, N69D, K68P, V392I, I72V, S50C, E66A, V156S, N276W, V156A, N69D/L148M/P348S/D372R/V392I, I52L/N69D/L148M/P348S/V392I, I52L/L148M/P348S/D372R, L147V/M205L/F313L/F373V/I408V, N69D/L148M/P348S/V392I, I52L/P348S/D372R, N69D/L148M/P348S, I52L/A136L/P348S/D372R, L148M/P348S, P348S/D372R/V392I, I52L/P348S/V392I, A136L/P348S, P348S/D372R, N69D/A136L/P348S, A136V/F313L/E352H/F373V/I408V, L147V/F313L/E352H/I408V, I52L/L148M/P348S, L148M/P348R/D372R, L148M/P348R, I52L/A136L/P348S, I52L/N69D/P348R/D372R/V392I, P348S/V392I, L147V/F313L, N69D/L148M/D372R/V392I, A136L/L148M/P348S/V392I, A136L/D372R, P348R/V392I, N69D/P348R/V392I, L147V/M205L, N69D/A136L/D372R/V392I, N69D/A136L/D372R, L147V/M205L/E352H, L148M/D372R, I52L/N69D/P348R/D372R, I52L/N69D/P348R, A136V/F373V, K68P/A136V/F313L/I408V, A136V/M205L/F313L/E352H/I408V, L147V/E352H/I408V, I52L/L148M/D372R, M205L/F313L/E352H, F313L/E352H/I408V, S143N/F313L/I408V, A136V/E352H/F373V, L147V/E352H, K68P/F313L, A136V/M205L/I408V, K68P/A136V/I408V, F313L/I408V, N69D/L148M, I52L/D372R/V392I, L148M/V392I, H5N/I52L/N69D/D372R/V392I, N69D/A136L/P348R, A136L/P348R/V392I, A136V/F313L/E352H, I52L/L148M/P348R, A136V/F313L, I52L/L148M, D372R/V392I, I52L/N69D/D372R, A136V/M205L/F313L, M205L/P208Q/F313L, A136V/E352H/I408V, M205L/F313L, I52L/A136L, F313L/E352H, A136L/L148M/P348R, A136V/I408V, A136L/V392I, K68P/A136V, A136V/M205L, N69D/A136L, I52L/P348R/D372R, I52L/A136L/D372R/V392I, I52L/L148M/V392I, K68P/A136V/M205L/E352H, M205L/E352H/F373V/I408V, N69D/V392I, A136V/M205L/E352H, M205L/I408V, M205L/E352H/I408V, 1408V, I52L/A136L/P348R, I52L/N69D, I52L/N69D/V392I, N69D/A136L/P348R/D372R, N69D/A136L/L148M/V392I, K68P/E352H/F373V/I408V, K68P/E352H, I52L/V392I, A136V/L147V/M205L/F373V/I408V, or M205L/E352H, wherein the amino acid positions are relative to the reference sequence corresponding to amino acid residues 12-417 of SEQ ID NO: 4, or relative to the reference sequence corresponding to SEQ ID NO: 4.

[0189] In some embodiments, the amino acid sequence of the engineered acetate kinase comprises at least a substitution at an amino acid position set forth in Tables 7.2, 8.2, 9.2, 10.2, 11.2, 12.2, 14.2, 15.2, 16.2, 17.2, 19.2, 22.2, 23.2, 24.2, 25.2, 26.2, 27.2, and 28.2, wherein the amino acid positions are relative to the reference sequence corresponding to amino acid residues 12-417 of SEQ ID NO: 4, or relative to the reference sequence corresponding to SEQ ID NO: 4.

[0190] In some embodiments, the amino acid sequence of the engineered acetate kinase comprises at least one substitution as set forth in Tables 7.2, 8.2, 9.2, 10.2, 11.2, 12.2, 14.2, 15.2, 16.2, 17.2, 19.2, 22.2, 23.2, 24.2, 25.2, 26.2, 27.2, and 28.2, wherein the amino acid positions are relative to the reference sequence corresponding to amino acid residues 12-417 of SEQ ID NO: 4, or relative to the reference sequence corresponding to SEQ ID NO: 4.

[0191] In some embodiments, the amino acid sequence of the engineered acetate kinase comprises at least a substitution or substitution set at amino acid position(s) set forth in Tables 7.2, 8.2, 9.2, 10.2, 11.2, 12.2, 14.2, 15.2, 16.2, 17.2, 19.2, 22.2, 23.2, 24.2, 25.2, 26.2, 27.2, and 28.2, wherein the amino acid positions are relative to the reference sequence corresponding to amino acid residues 12-417 of SEQ ID NO: 4, or relative to the reference sequence corresponding to SEQ ID NO: 4.

[0192] In some embodiments, the amino acid sequence of the engineered acetate kinase comprises at least a substitution or substitution set of an engineered acetate kinase variant set forth in Tables 7.2, 8.2, 9.2, 10.2, 11.2, 12.2, 14.2, 15.2, 16.2, 17.2, 19.2, 22.2, 23.2, 24.2, 25.2, 26.2, 27.2, and 28.2, wherein the amino acid positions are relative to the reference sequence corresponding to amino acid residues 12-417 of SEQ ID NO: 4, or relative to the reference sequence corresponding to SEQ ID NO: 4.

[0193] In some embodiments, the engineered acetate kinase comprises an amino acid sequence having at least 70%, 75%, 80%, 81%, 82%, 83%, 84%, 85%, 86%, 87%, 88%, 89%, 90%, 91%, 92%, 93%, 94%, 95%, 96%, 97%, 98%, 99% or more sequence identity to a reference amino acid sequence comprising a substitution or substitution set of an engineered acetate kinase variant set forth in Tables 7.2, 8.2, 9.2, 10.2, 11.2, 12.2, 14.2, 15.2, 16.2, 17.2, 19.2, 22.2, 23.2, 24.2, 25.2, 26.2, 27.2, and 28.2, wherein the amino acid positions are relative to the reference sequence corresponding to amino acid residues 12-417 of SEQ ID NO: 4, or relative to the reference sequence corresponding to SEQ ID NO: 4.

[0194] In some embodiments, the engineered acetate kinase comprises an amino acid sequence having at least 70%, 75%, 80%, 81%, 82%, 83%, 84%, 85%, 86%, 87%, 88%, 89%, 90%, 91%, 92%, 93%, 94%, 95%, 96%, 97%, 98%, 99%, or more sequence identity to the reference sequence corresponding to residues 12-417 of SEQ ID NO: 254, 396, 620, 846, 1240, or 1250, or to the reference sequence corresponding to SEQ ID NO: 254, 396, 620, 846, 1240, or 1250.

[0195] In some embodiments, the engineered acetate kinase comprises an amino acid sequence having at least 70%, 75%, 80%, 81%, 82%, 83%, 84%, 85%, 86%, 87%, 88%, 89%, 90%, 91%, 92%, 93%, 94%, 95%, 96%, 97%, 98%, 99%, or more sequence identity to a reference sequence corresponding to residues 12-417 of an even-numbered SEQ ID NO. of SEQ ID NOs: 14-566, 612-868, 894-924, and 940-1390, or to a reference sequence corresponding to an even-numbered SEQ ID NO. of SEQ ID NOs: 14-566, 612-868, 894-924, and 940-1390.

[0196] In some embodiments, the engineered acetate kinase comprises an amino acid sequence having at least 70%, 75%, 80%, 81%, 82%, 83%, 84%, 85%, 86%, 87%, 88%, 89%, 90%, 91%, 92%, 93%, 94%, 95%, 96%, 97%, 98%, 99%, or more sequence identity to the reference sequence corresponding to residues 12-417 of SEQ ID NO: 254, 396, 620, 846, 1240, or 1250, or to the reference sequence corresponding to SEQ ID NO: 254, 396, 620, 846, 1240, or 1250, wherein the amino acid sequence comprises one or more substitutions relative to the reference sequence corresponding to residues 12-417 of SEQ ID NO: 254, 396, 620, 846, 1240, or 1250, or relative to the reference sequence corresponding to SEQ ID NO: 254, 396, 620, 846, 1240, or 1250.

[0197] In some embodiments, the engineered acetate kinase comprises an amino acid sequence having at least 70%, 75%, 80%, 81%, 82%, 83%, 84%, 85%, 86%, 87%, 88%, 89%, 90%, 91%, 92%, 93%, 94%, 95%, 96%, 97%, 98%, 99%, or more sequence identity to the reference sequence corresponding to residues 12-417 of an even-numbered SEQ ID NO. of SEQ ID NOs: 14-566, 612-868, 894-924, and 940-1390, or to the reference sequence corresponding to an even-numbered SEQ ID NO. of SEQ ID NOs: 14-566, 612-868, 894-924, and 940-1390, wherein the amino acid sequence comprises one or more substitutions relative to the reference sequence corresponding to residues 12-417 of SEQ ID NO: 254, 396, 620, 846, 1240, or 1250, or relative to the reference sequence corresponding to SEQ ID NO: 254, 396, 620, 846, 1240, or 1250.

[0198] In some embodiments, the amino acid sequence of the engineered acetate kinase comprises at least a substitution at amino acid position 4, 5, 10, 11, 13, 14, 15, 16, 18, 19, 22, 26, 27, 28, 30, 31, 32, 36, 38, 41, 43, 46, 49, 50, 52, 54, 55, 60, 61, 62, 63, 64, 65, 66, 68, 69, 72, 74, 75, 76, 77, 79, 80, 87, 88, 91, 97, 98, 107, 113, 114, 110, 115, 116, 117, 118, 119, 120, 121, 123, 126, 127, 128, 130, 133, 134, 135, 136, 137, 138, 139, 141, 142, 143, 144, 145, 146, 147, 148, 149, 150, 151, 152, 156, 157, 160, 163, 165, 167, 170, 176, 180, 182, 183, 189, 190, 192, 196, 199, 201, 204, 205, 207, 208, 209, 210, 211, 212, 213, 216, 217, 223, 225, 227, 229, 231, 238, 240, 242, 246, 248, 249, 251, 257, 258, 260, 261, 263, 264, 265, 266, 268, 269, 270, 273, 276, 277, 279, 280, 284, 285, 288, 291, 292, 293, 295, 297, 298, 299, 300, 301, 302, 303, 304, 306, 308, 309, 310, 311, 312, 313, 314, 315, 316, 317, 318, 320, 323, 324, 329, 339, 340, 343, 344, 345, 347, 348, 349, 350, 352, 353, 354, 355, 356, 358, 360, 361, 363, 364, 369, 370, 372, 373, 374, 375, 376, 383, 384, 385, 387, 390, 391, 392, 393, 394, 395, 398, 400, 402, 404, 405, 406, 407, 408, or 409, or combinations thereof, wherein the amino acid positions are relative to the reference sequence corresponding to residues 12-417 of SEQ ID NO: 254, 396, 620, 846, 1240, or 1250, or relative to the reference sequence corresponding to SEQ ID NO: 254, 396, 620, 846, 1240, or 1250.

[0199] In some embodiments, the amino acid sequence of the engineered acetate kinase comprises at least a substitution or amino acid residue 4Y, 5N, 10I, 11D, 13S, 14E/M/S, 15G/I/T, 16N/S, 18A, 19C/G/L/P/Q, 22H/R/Y, 26G, 27G/L, 28I/W, 30S, 31E/F/R/W, 32A/R/S, 36A, 38F/L/M/R/Y, 41M, 43A, 46L/Q, 49A/R, 50C/T, 52L, 54A/L/P/V, 55E/F/L/M/S/T/V, 60A/G/P/S/T, 61K/S, 62T, 63M, 64A/K/L/Q/R/V, 65A/I/R/S, 66A/G/R, 68A/G/P/Q, 69D, 72V, 74I/S, 75F/H/L/V/W, 76G/S, 77G/H, 79E/K, 80I/M/S, 87R, 88L/N/P, 91L, 97V, 98G/M/W, 107L, 113M, 114L/Q/S/T/V, 110K, 115G/Q/S/T/Y, 116M, 117M, 118H/P, 119L/M, 120S, 121G, 123V, 126C, 127L, 128W, 130I, 133G, 134L/Q, 135A/L/V, 136I/K/L/M/R/V, 137A/F/I, 138L/V, 139E/L/R, 141C/R/W/Y, 142F/W, 143G/N, 144A/C/I/T, 145C/D, 146E, 147C/E/G/K/M/V/Y, 148M, 149C, 150T, 151A, 152I, 156A/K/M/R/S, 157L, 160C, 163R, 165A, 167G, 170L, 176V, 180R/T, 182R, 183L/N, 189M, 190Q, 192C/V, 196L/R, 199L, 201Q/W, 204P, 205L/R, 207D/L/T, 208Q, 209K/L/R, 210E/P/V/W, 211M/V, 212T/Y, 213S, 216G/L/S, 217C/L/M/P/W, 223G/T, 225G/H/I/L, 227S, 229L/S/T, 231P, 238Q, 240G, 242V, 246P, 248G, 249A, 251D, 257V/W, 258Y, 260F, 261R/S, 263C, 264V, 265L, 266I/R/Y, 268Q, 269V, 270T, 273H/S/T, 276S/W, 277A/S, 279L/S/W, 280R, 284T, 285L/P/Q/R/V, 288I/L/N, 291G/N/P/R/S/T/W, 292A/G/Q/T/Y, 293M/R, 295I/L, 297L/N/P, 298L/T, 299F/I/L/M/S/T/V, 300A/F/I/L/M/N/Q/R/S/W/Y, 301A/C/D/F/H/K/M/R/S, 302C, 303K/M/R, 304I/P/Q/S/W, 306R, 308A/L, 309A/F/H/M/P/R, 310L, 311V, 312G, 313F/L, 314G/S/V/W, 315I, 316E/H/M/R, 317A/F/G/I/L/Q/R/S/T/V/W/Y, 318P, 320G/W, 323P, 324L, 329V, 339V, 340P, 343F, 344C/L, 345N, 347G/P/R, 348H/L/R/S/V, 349C, 350A/C/L/V, 352H/M/R/S/W/Y, 353I/R/V, 354C/L/S, 355P, 356S, 358G, 360R, 361P, 363A/V, 364L, 369N, 370H/L/M/T, 372G/L/P/R/S/Y, 373P/T/V, 374A/C/E/Q/R/W, 375A/T/V/Y, 376R/S/Y, 391G/P/Q/R, 383R, 384K, 385E/V, 387T, 390G, 392I/P, 393F/H/L/Q/S, 394H, 395A/Q, 398Y, 400P, 402E/M, 404L/M, 405D, 406I/L, 407L/M/R, 408V, or 409A, or combinations thereof, wherein the amino acid positions are relative to the reference sequence corresponding to residues 12-417 of SEQ ID NO: 254, 396, 620, 846, 1240, or 1250, or relative to the reference sequence corresponding to SEQ ID NO: 254, 396, 620, 846, 1240, or 1250.

[0200] In some embodiments, the amino acid sequence of the engineered acetate kinase comprises at least a substitution at amino acid position 32, 54, 88, 147, 209, 277, 279, 293, 299, 313, or 344, or combinations thereof, wherein the amino acid positions are relative to the reference sequence corresponding to amino acid residues 12-417 of SEQ ID NO: 254, 396, 620, 846, 1240, or 1250, or relative to the reference sequence corresponding to SEQ ID NO: 254, 396, 620, 846, 1240, or 1250.

[0201] In some embodiments, the amino acid sequence of the engineered acetate kinase comprises at least a substitution or amino acid residue 32A/R/S, 54A/L/P/V, 88L/N/P, 147C/E/G/K/M/V/Y, 209K/L/R, 277A/S, 279L/S/W, 293M/R, 299F/I/L/M/S/T/V, 313G/S/V/W, or 344C/L, or combinations thereof, wherein the amino acid positions are relative to the reference sequence corresponding to amino acid residues 12-417 of SEQ ID NO: 254, 396, 620, 846, 1240, or 1250, or relative to the reference sequence corresponding to SEQ ID NO: 254, 396, 620, 846, 1240, or 1250.

[0202] In some embodiments, the engineered acetate kinase comprises an amino acid sequence having at least 70%, 75%, 80%, 81%, 82%, 83%, 84%, 85%, 86%, 87%, 88%, 89%, 90%, 91%, 92%, 93%, 94%, 95%, 96%, 97%, 98%, 99%, or more sequence identity to the reference sequence corresponding to residues 12-417 of SEQ ID NO: 254, or to the reference sequence corresponding to SEQ ID NO: 254, wherein the amino acid sequence comprises one or more substitutions relative to the reference sequence corresponding to residues 12-417 of SEQ ID NO: 254, or relative to the reference sequence corresponding to SEQ ID NO: 254.

[0203] In some embodiments, the engineered acetate kinase comprises an amino acid sequence having at least 70%, 75%, 80%, 81%, 82%, 83%, 84%, 85%, 86%, 87%, 88%, 89%, 90%, 91%, 92%, 93%, 94%, 95%, 96%, 97%, 98%, 99%, or more sequence identity to the reference sequence corresponding to residues 12-417 of an even-numbered SEQ ID NO. of SEQ ID NOs: 396-566, or to the reference sequence corresponding to an even-numbered SEQ ID NO. of SEQ ID NOs: 396-566, wherein the amino acid sequence comprises one or more substitutions relative to the reference sequence corresponding to residues 12-417 of SEQ ID NO: 254, or relative to the reference sequence corresponding to SEQ ID NO: 254.

[0204] In some embodiments, the amino acid sequence of the engineered acetate kinase comprises at least a substitution or substitution set at amino acid position(s) 299, 300, 303, 317, 144, 374, 63, 301, 134, 60, 65, 68, 55, 301/308, 110, 139, 64, 192, 80, 61, 249, 376, 143, 395, 217, 248, 295, 285, 74, 62, 76, or 79, or combinations thereof, wherein the amino acid positions are relative to the reference sequence corresponding to residues 12-417 of SEQ ID NO: 254, or relative to the reference sequence corresponding to SEQ ID NO: 254.

[0205] In some embodiments, the amino acid sequence of the engineered acetate kinase comprises at least a substitution or substitution set, or amino acid residue(s) 299V, 299F, 299L, 299T, 299M, 299S, 300R, 300L, 303K, 300A, 303R, 300S, 300F, 300I, 300Q, 300Y, 300N, 317L, 144A, 317Y, 303M, 374R, 63M, 301K, 134L, 301S, 60A, 300W, 65S, 68A, 60T, 301H, 60S, 65A, 55S, 301R/308L, 110K, 139E, 68P, 55E, 55T, 65R, 55V, 64Q, 192V, 80M, 60P, 61K, 134Q, 55M, 68G, 55F, 55L, 249A, 68Q, 301M, 376R, 139L, 317T, 301R, 143G, 395A, 217M, 376S, 80S, 139R, 217L, 64L, 64R, 64K, 248G, 64V, 295L, 285L, 74S, 62T, 65I, 395Q, 76G, 79E, 80I, 76S, 79K, 192C, 61S, or 64A, or combinations thereof, wherein the amino acid positions are relative to the reference sequence corresponding to residues 12-417 of SEQ ID NO: 254, or relative to the reference sequence corresponding to SEQ ID NO: 254.

[0206] In some embodiments, the amino acid sequence of the engineered acetate kinase comprises at least a substitution or substitution set, or amino acid residue E299V, E299F, E299L, E299T, E299M, E299S, D300R, D300L, 1303K, D300A, I303R, D300S, D300F, D300I, D300Q, D300Y, D300N, E317L, S144A, E317Y, I303M, K374R, L63M, N301K, N134L, N301S, K60A, D300W, H65S, K68A, K60T, N301H, K60S, H65A, K55S, N301R/V308L, A110K, M139E, K68P, K55E, K55T, H65R, K55V, E64Q, T192V, L80M, K60P, H61K, N134Q, K55M, K68G, K55F, K55L, G249A, K68Q, N301M, E376R, M139L, E317T, N301R, S143G, N395A, V217M, E376S, L80S, M139R, V217L, E64L, E64R, E64K, M248G, E64V, M295L, Y285L, L74S, V62T, H65I, N395Q, L76G, D79E, L80I, L76S, D79K, T192C, H61S, or E64A, or combinations thereof, wherein the amino acid positions are relative to the reference sequence corresponding to residues 12-417 of SEQ ID NO: 254, or relative to the reference sequence corresponding to SEQ ID NO: 254.

[0207] In some embodiments, the engineered acetate kinase comprises an amino acid sequence having at least 70%, 75%, 80%, 81%, 82%, 83%, 84%, 85%, 86%, 87%, 88%, 89%, 90%, 91%, 92%, 93%, 94%, 95%, 96%, 97%, 98%, 99%, or more sequence identity to the reference sequence corresponding to residues 12-417 of SEQ ID NO: 396, or to the reference sequence corresponding to SEQ ID NO: 396, wherein the amino acid sequence comprises one or more substitutions relative to the reference sequence corresponding to residues 12-417 of SEQ ID NO: 396, or relative to the reference sequence corresponding to SEQ ID NO: 396.

[0208] In some embodiments, the engineered acetate kinase comprises an amino acid sequence having at least 70%, 75%, 80%, 81%, 82%, 83%, 84%, 85%, 86%, 87%, 88%, 89%, 90%, 91%, 92%, 93%, 94%, 95%, 96%, 97%, 98%, 99%, or more sequence identity to the reference sequence corresponding to residues 12-417 of an even-numbered SEQ ID NO. of SEQ ID NOs: 612-802, or to the reference sequence corresponding to an even-numbered SEQ ID NO. of SEQ ID NOs: 612-802, wherein the amino acid sequence comprises one or more substitutions relative to the reference sequence corresponding to residues 12-417 of SEQ ID NO: 396, or relative to the reference sequence corresponding to SEQ ID NO: 396.

[0209] In some embodiments, the amino acid sequence of the engineered acetate kinase comprises at least a substitution or substitution set at amino acid position(s) 55/303/308/343/344, 32/55/344, 55/303/308/344, 295/303/308, 60/300/301/317, 344, 300/301/316/317/374, 55/344, 374, 295/308, 300/301/317, 301/317, 55/303/308, 300/301/374, 308, 317, 288, 320, 298, 312, 353, 348, 375, 304, 216, 217, 391, 292, 285, 225, 373, 300, 352, 354, 133, 293, 309, 190, 314, 297, 393, 350, 301, 372, 310, 299, 291, 284, or 313, wherein the amino acid positions are relative to the reference sequence corresponding to residues 12-417 of SEQ ID NO: 396, or relative to the reference sequence corresponding to SEQ ID NO: 396.

[0210] In some embodiments, the amino acid sequence of the engineered acetate kinase comprises at least a substitution or substitution set, or amino acid residue(s) 55S/303R/308L/343F/344L, 32S/55S/344L, 55S/303R/308L/344L, 295I/303R/308L, 60G/300L/301K/317Y, 344L, 300A/301K/316M/317Y/374Q, 55S/344L, 374C, 295I/308L, 300L/301K/317Y, 301R/317Y, 55E/303R/308L, 300A/301R/374Q, 308L, 317R, 288I, 320W, 298T, 312G, 317W, 288N, 353V, 348S, 375T, 304W, 216L, 217P, 391G, 292T, 285V, 225L, 373P, 348L, 353R, 285P, 300W, 292Y, 285R, 352Y, 374R, 354L, 133G, 293M, 288L, 309F, 317Q, 190Q, 391P, 304I, 300L, 375A, 314V, 314W, 309H, 297N, 285Q, 393F, 292Q, 391Q, 350C, 301C, 225G, 372L, 317T, 317G, 310L, 299F, 300S, 304P, 372S, 317L, 301F, 301D, 352W, 291R, 317S, 284T, 375V, 374E, 374A, 301R, 354C, 317V, 352R, 374W, 313F, 354S, 372Y, 216S, 350L, 298L, 297P, 373T, 301H, or 225H, wherein the amino acid positions are relative to the reference sequence corresponding to residues 12-417 of SEQ ID NO: 396, or relative to the reference sequence corresponding to SEQ ID NO: 396.

[0211] In some embodiments, the amino acid sequence of the engineered acetate kinase comprises at least a substitution or substitution set, or amino acid residue(s) K55S/1303R/V308L/V343F/G344L, T32S/K55S/G344L, K55S/1303R/V308L/G344L, M295I/1303R/V308L, K60G/D300L/N301K/E317Y, G344L, D300A/N301K/Y316M/E317Y/K374Q, K55S/G344L, K374C, M295I/V308L, D300L/N301K/E317Y, N301R/E317Y, K55E/1303R/V308L, D300A/N301R/K374Q, V308L, E317R, T288I, 1320W, 1298T, A312G, E317W, T288N, E353V, P348S, G375T, E304W, T216L, V217P, V391G, S292T, Y285V, V225L, F373P, P348L, E353R, Y285P, D300W, S292Y, Y285R, E352Y, K374R, 1354L, H133G, S293M, T288L, C309F, E317Q, H190Q, V391P, E304I, D300L, G375A, D314V, D314W, C309H, D297N, Y285Q, P393F, S292Q, V391Q, M350C, N301C, V225G, D372L, E317T, E317G, R310L, V299F, D300S, E304P, D372S, E317L, N301F, N301D, E352W, F291R, E317S, V284T, G375V, K374E, K374A, N301R, 1354C, E317V, E352R, K374W, L313F, 1354S, D372Y, T216S, M350L, I298L, D297P, F373T, N301H, or V225H, wherein the amino acid positions are relative to the reference sequence corresponding to residues 12-417 of SEQ ID NO: 396, or relative to the reference sequence corresponding to SEQ ID NO: 396.

[0212] In some embodiments, the engineered acetate kinase comprises an amino acid sequence having at least 70%, 75%, 80%, 81%, 82%, 83%, 84%, 85%, 86%, 87%, 88%, 89%, 90%, 91%, 92%, 93%, 94%, 95%, 96%, 97%, 98%, 99%, or more sequence identity to the reference sequence corresponding to residues 12-417 of SEQ ID NO: 620, or to the reference sequence corresponding to SEQ ID NO: 620, wherein the amino acid sequence comprises one or more substitutions relative to the reference sequence corresponding to residues 12-417 of SEQ ID NO: 620, or relative to the reference sequence corresponding to SEQ ID NO: 620.

[0213] In some embodiments, the engineered acetate kinase comprises an amino acid sequence having at least 70%, 75%, 80%, 81%, 82%, 83%, 84%, 85%, 86%, 87%, 88%, 89%, 90%, 91%, 92%, 93%, 94%, 95%, 96%, 97%, 98%, 99%, or more sequence identity to the reference sequence corresponding to residues 12-417 of an even-numbered SEQ ID NO. of SEQ ID NOs: 804-868, 894-924, 940-980, 1240, 1250, and 1388-1390, or to the reference sequence corresponding to an even-numbered SEQ ID NO. of SEQ ID NOs: 804-868, 894-924, 940-980, 1240, 1250, and 1388-1390, wherein the amino acid sequence comprises one or more substitutions relative to the reference sequence corresponding to residues 12-417 of SEQ ID NO: 620, or relative to the reference sequence corresponding to SEQ ID NO: 620.

[0214] In some embodiments, the amino acid sequence of the engineered acetate kinase comprises at least a substitution at amino acid position(s) 350, 376, 393, 372, 279, 300, 291, 314, 10, 285, 373, 317, 238, 216, 304, 309, 293, 246, 27, 391, 196, 299, or 349, or combinations thereof, wherein the amino acid positions are relative to the reference sequence corresponding to residues 12-417 of SEQ ID NO: 620, or relative to the reference sequence corresponding to SEQ ID NO: 620.

[0215] In some embodiments, the amino acid sequence of the engineered acetate kinase comprises at least a substitution or amino acid residue 350A, 376Y, 393S, 372P, 279L, 300Q, 300M, 291T, 314S, 372S, 10I, 285Q, 373V, 317W, 238Q, 216S, 304S, 304Q, 350V, 309M, 279S, 293R, 246P, 314G, 27G, 391R, 317I, 393Q, 196R, 299L, 349C, 317F, or 309P, or combinations thereof, wherein the amino acid positions are relative to the reference sequence corresponding to residues 12-417 of SEQ ID NO: 620, or relative to the reference sequence corresponding to SEQ ID NO: 620.

[0216] In some embodiments, the amino acid sequence of the engineered acetate kinase comprises at least a substitution or amino acid residue M350A, E376Y, P393S, D372P, N279L, L300Q, L300M, F291T, D314S, D372S, S10I, Y285Q, F373V, Y317W, M238Q, T216S, E304S, E304Q, M350V, C309M, N279S, S293R, L246P, D314G, Q27G, V391R, Y317I, P393Q, Y196R, V299L, 1349C, Y317F, or C309P, or combinations thereof, wherein the amino acid positions are relative to the reference sequence corresponding to residues 12-417 of SEQ ID NO: 620, or relative to the reference sequence corresponding to SEQ ID NO: 620.

[0217] In some embodiments, the amino acid sequence of the engineered acetate kinase comprises at least a substitution or substitution set at amino acid position(s) 251, 242, 393, 18, 299, 316, 344, 400, 340, 347, 217, 394, 22, 309, 372, 285, 291, 297, 300, 279, 43, 225, 216, 352, 302, 292, 353, 189, 375, 279/293, 32/54/88/209/277/279/293, 32/38/54/88/209/277/279/293, or 16/32/38/54/88/209/277/279/293, wherein the amino acid positions are relative to the reference sequence corresponding to residues 12-417 of SEQ ID NO: 620, or relative to the reference sequence corresponding to SEQ ID NO: 620.

[0218] In some embodiments, the amino acid sequence of the engineered acetate kinase comprises at least a substitution or substitution set, or amino acid residue(s) 251D, 242V, 393L, 18A, 299I, 316H, 344C, 400P, 340P, 347R, 217W, 394H, 22H, 309A, 372G, 347P, 285R, 291P, 291S, 297L, 291N, 300R, 291G, 279W, 43A, 225I, 216G, 352M, 302C, 309R, 22R, 292A, 291W, 353I, 189M, 375Y, 316R, 279W/293R, 32R/54L/88P/209L/277A/279W/293R, 32R/38L/54L/88P/209L/277A/279W/293R, or 16S/32R/38L/54L/88P/209L/277A/279W/293R, wherein the amino acid positions are relative to the reference sequence corresponding to residues 12-417 of SEQ ID NO: 620, or relative to the reference sequence corresponding to SEQ ID NO: 620.

[0219] In some embodiments, the amino acid sequence of the engineered acetate kinase comprises at least a substitution or substitution set, or amino acid residue(s) R251D, P242V, P393L, N18A, V299I, Y316H, G344C, I400P, T340P, S347R, V217W, T394H, S22H, C309A, D372G, S347P, Y285R, F291P, F291S, D297L, F291N, L300R, F291G, N279W, E43A, V225I, T216G, E352M, A302C, C309R, S22R, S292A, F291W, E353I, F189M, G375Y, Y316R, N279W/S293R, T32R/H54L/V88P/Y209L/I277A/N279W/S293R, T32R/A38L/H54L/V88P/Y209L/I277A/N279W/S293R, or V16S/T32R/A38L/H54L/V88P/Y209L/I277A/N279W/S293R, wherein the amino acid positions are relative to the reference sequence corresponding to residues 12-417 of SEQ ID NO: 620, or relative to the reference sequence corresponding to SEQ ID NO: 620.

[0220] In some embodiments, the engineered acetate kinase comprises an amino acid sequence having at least 70%, 75%, 80%, 81%, 82%, 83%, 84%, 85%, 86%, 87%, 88%, 89%, 90%, 91%, 92%, 93%, 94%, 95%, 96%, 97%, 98%, 99%, or more sequence identity to the reference sequence corresponding to residues 12-417 of SEQ ID NO: 846, or to the reference sequence corresponding to SEQ ID NO: 846, wherein the amino acid sequence comprises one or more substitutions relative to the reference sequence corresponding to residues 12-417 of SEQ ID NO: 846, or relative to the reference sequence corresponding to SEQ ID NO: 846.

[0221] In some embodiments, the engineered acetate kinase comprises an amino acid sequence having at least 70%, 75%, 80%, 81%, 82%, 83%, 84%, 85%, 86%, 87%, 88%, 89%, 90%, 91%, 92%, 93%, 94%, 95%, 96%, 97%, 98%, 99%, or more sequence identity to the reference sequence corresponding to residues 12-417 of an even-numbered SEQ ID NO. of SEQ ID NOs: 982-1238, or to the reference sequence corresponding to an even-numbered SEQ ID NO. of SEQ ID NOs: 982-1238, wherein the amino acid sequence comprises one or more substitutions relative to the reference sequence corresponding to residues 12-417 of SEQ ID NO: 846, or relative to the reference sequence corresponding to SEQ ID NO: 846.

[0222] In some embodiments, the amino acid sequence of the engineered acetate kinase comprises at least a substitution or substitution set at amino acid position(s) 19, 385, 231, 209, 31, 370, 183, 258, 14, 212, 355, 54, 240, 323, 356, 182, 263, 266, 119, 114, 118, 211, 358, 121, 277, 265, 306, 318, 28, 257, 269, 315, 38, 114/119/123, 205, 88, 152, 210, 384, 273, 180, 201, 402, 207, 127, 199, 128, 329, 91, 87, 264, 113/229, 30, 261, 398, 405, 363, 324, 204, 409, 213, 227, 361, 229, 383, 32/88, 149, 36, 88/387,360, 150, 270, 49/54, 176, 406, 260, 167, 268, 364, 390, 117, 13, 116, or 279/293, wherein the amino acid positions are relative to the reference sequence corresponding to residues 12-417 of SEQ ID NO: 846, or relative to the reference sequence corresponding to SEQ ID NO: 846.

[0223] In some embodiments, the amino acid sequence of the engineered acetate kinase comprises at least a substitution or substitution set, or amino acid residue(s) 19L, 385E, 231P, 209K, 31F, 370L, 183L, 258Y, 14E, 212T, 355P, 54L, 240G, 323P, 356S, 182R, 263C, 266R, 119L, 114V, 118H, 211V, 358G, 114T, 54P, 121G, 277S, 265L, 306R, 318P, 28W, 257W, 269V, 114S, 315I, 38R, 114Q/119M/123V, 385V, 205R, 38L, 19Q, 31R, 88P, 19P, 14M, 38Y, 88N, 152I, 210E, 384K, 273T, 38M, 31W, 210V, 31E, 180T, 212Y, 201W, 402E, 207D, 127L, 199L, 210W, 209L, 14S, 266I, 128W, 329V, 118P, 91L, 87R, 264V, 113M/229S, 30S, 261R, 398Y, 405D, 363A, 324L, 204P, 370M, 409A, 213S, 54V, 227S, 361P, 114L, 207T, 229T, 383R, 209R, 32A/88L, 149C, 36A, 207L, 88L/387T, 360R, 183N, 150T, 270T, 273S, 180R, 210P, 49A/54A, 176V, 406L, 260F, 406I, 167G, 211M, 201Q, 229S, 229L, 268Q, 364L, 370T, 273H, 19G, 390G, 257V, 363V, 266Y, 402M, 117M, 38F, 261S, 13S, 370H, 116M, or 279W/293R, wherein the amino acid positions are relative to the reference sequence corresponding to residues 12-417 of SEQ ID NO: 846, or relative to the reference sequence corresponding to SEQ ID NO: 846.

[0224] In some embodiments, the amino acid sequence of the engineered acetate kinase comprises at least a substitution or substitution set, or amino acid residue(s) S19L, S385E, G231P, Y209K, M31F, A370L, K183L, A258Y, V14E, L212T, 1355P, H54L, F240G, Y323P, E356S, Y182R, L263C, E266R, V119L, K114V, E118H, Q211V, Y358G, K114T, H54P, K121G, 1277S, K265L, D306R, Y318P, L28W, P257W, L269V, K114S, V315I, A38R, K114Q/V119M/I123V, S385V, M205R, A38L, S19Q, M31R, V88P, S19P, V14M, A38Y, V88N, P152I, D210E, D384K, E273T, A38M, M31W, D210V, M31E, E180T, L212Y, A201W, K402E, K207D, S127L, K199L, D210W, Y209L, V14S, E266I, F128W, A329V, E118P, D91L, G87R, E264V, V113M/K229S, D30S, E261R, L398Y, K405D, G363A, I324L, I204P, A370M, E409A, K213S, H54V, A227S, Y361P, K114L, K207T, K229T, P383R, Y209R, T32A/V88L, P149C, V36A, K207L, V88L/V387T, G360R, K183N, G150T, S270T, E273S, E180R, D210P, G49A/H54A, Y176V, E406L, V260F, E406I, E167G, Q211M, A201Q, K229S, K229L, G268Q, I364L, A370T, E273H, S19G, M390G, P257V, G363V, E266Y, K402M, D117M, A38F, E261S, K13S, A370H, T116M, or N279W/S293R, wherein the amino acid positions are relative to the reference sequence corresponding to residues 12-417 of SEQ ID NO: 846, or relative to the reference sequence corresponding to SEQ ID NO: 846.

[0225] In some embodiments, the engineered acetate kinase comprises an amino acid sequence having at least 70%, 75%, 80%, 81%, 82%, 83%, 84%, 85%, 86%, 87%, 88%, 89%, 90%, 91%, 92%, 93%, 94%, 95%, 96%, 97%, 98%, 99%, or more sequence identity to the reference sequence corresponding to residues 12-417 of SEQ ID NO: 1240, or to the reference sequence corresponding to SEQ ID NO: 1240, wherein the amino acid sequence comprises one or more substitutions relative to the reference sequence corresponding to residues 12-417 of SEQ ID NO: 1240, or relative to the reference sequence corresponding to SEQ ID NO: 1240.

[0226] In some embodiments, the engineered acetate kinase comprises an amino acid sequence having at least 70%, 75%, 80%, 81%, 82%, 83%, 84%, 85%, 86%, 87%, 88%, 89%, 90%, 91%, 92%, 93%, 94%, 95%, 96%, 97%, 98%, 99%, or more sequence identity to the reference sequence corresponding to residues 12-417 of an even-numbered SEQ ID NO. of SEQ ID NOs: 1242-1346, or to the reference sequence corresponding to an even-numbered SEQ ID NO. of SEQ ID NOs: 1242-1346, wherein the amino acid sequence comprises one or more substitutions relative to the reference sequence corresponding to residues 12-417 of SEQ ID NO: 1240, or relative to the reference sequence corresponding to SEQ ID NO: 1240.

[0227] In some embodiments, the amino acid sequence of the engineered acetate kinase comprises at least a substitution or substitution set at amino acid position(s) 19/22/285/300, 285/297/398, 127/183/297, 19/127/300, 32/54/88/209/277, 277/291, 127/183/300/398, 19/22/398, 32/54/209/277, 398, 16/28/54, 88/209/277, 127/297, 14/32/291, 19/127/183/297/300/398, 16/88, 54/277, 32, 16, 32/54/209, 22/183/297/398, 88, 14/209, 16/32/54/209/277, 19/127/292/300/398, 54/291, 54/88/277, 32/54/88/291, 209, 54/209, 209/291, 19/127, 291, 88/277, 32/209, 127/285, 32/88/209, 14/54/291, 14/88, 285/300, 127/285/297, 16/54/277, 88/209/223, 4, 32/88/277, 127/297/398, 32/209/291, 32/88, 22/38/127/300, 38/127/297, or 285/297, wherein the amino acid positions are relative to the reference sequence corresponding to residues 12-417 of SEQ ID NO: 1240, or relative to the reference sequence corresponding to SEQ ID NO: 1240.

[0228] In some embodiments, the amino acid sequence of the engineered acetate kinase comprises at least a substitution or substitution set, or amino acid residue(s) 19Q/22R/285R/300R, 285R/297L/398Y, 127L/183N/297L, 19L/127L/300R, 32R/54L/88P/209L/277A, 277A/291P, 127L/183N/300R/398Y, 19Q/22R/398Y, 32R/54L/209R/277A, 398Y, 16S/28I/54L, 88P/209L/277A, 127L/297L, 14M/32R/291P, 19L/127L/183N/297L/300R/398Y, 16S/88P, 54L/277A, 32R, 16S, 32R/54L/209L, 22R/183N/297L/398Y, 88N, 14M/209R, 16S/32R/54L/209R/277A, 19Q/127L/292G/300R/398Y, 54L/291P, 54L/88N/277A, 32R/54L/88N/291P, 209R, 54L/209L, 209R/291P, 19Q/127L, 291P, 88P/277A, 88P, 32R/209L, 127L/285R, 32R/88N/209L, 14M/54L/291P, 14M/88P, 285R/300R, 127L/285R/297L, 209L/291P, 16S/54L/277A, 88N/209R/223T, 4Y, 32R/88P/277A, 127L/297L/398Y, 32R/209R/291P, 32R/88P, 22R/38L/127L/300R, 38F/127L/297L, or 285R/297L, wherein the amino acid positions are relative to the reference sequence corresponding to residues 12-417 of SEQ ID NO: 1240, or relative to the reference sequence corresponding to SEQ ID NO: 1240.

[0229] In some embodiments, the amino acid sequence of the engineered acetate kinase comprises at least a substitution or substitution set, or amino acid residue(s) S19Q/S22R/Y285R/L300R, Y285R/D297L/L398Y, S127L/K183N/D297L, S19L/S127L/L300R, T32R/H54L/V88P/Y209L/I277A, I277A/F291P, S127L/K183N/L300R/L398Y, S19Q/S22R/L398Y, T32R/H54L/Y209R/I277A, L398Y, V16S/L28I/H54L, V88P/Y209L/I277A, S127L/D297L, V14M/T32R/F291P, S19L/S127L/K183N/D297L/L300R/L398Y, V16S/V88P, H54L/I277A, T32R, V16S, T32R/H54L/Y209L, S22R/K183N/D297L/L398Y, V88N, V14M/Y209R, V16S/T32R/H54L/Y209R/I277A, S19Q/S127L/S292G/L300R/L398Y, H54L/F291P, H54L/V88N/I277A, T32R/H54L/V88N/F291P, Y209R, H54L/Y209L, Y209R/F291P, S19Q/S127L, F291P, V88P/I277A, V88P, T32R/Y209L, S127L/Y285R, T32R/V88N/Y209L, V14M/H54L/F291P, V14M/V88P, Y285R/L300R, S127L/Y285R/D297L, Y209L/F291P, V16S/H54L/I277A, V88N/Y209R/A223T, H4Y, T32R/V88P/I277A, S127L/D297L/L398Y, T32R/Y209R/F291P, T32R/V88P, S22R/A38L/S127L/L300R, A38F/S127L/D297L, or Y285R/D297L, wherein the amino acid positions are relative to the reference sequence corresponding to residues 12-417 of SEQ ID NO: 1240, or relative to the reference sequence corresponding to SEQ ID NO: 1240.

[0230] In some embodiments, the engineered acetate kinase comprises an amino acid sequence having at least 70%, 75%, 80%, 81%, 82%, 83%, 84%, 85%, 86%, 87%, 88%, 89%, 90%, 91%, 92%, 93%, 94%, 95%, 96%, 97%, 98%, 99%, or more sequence identity to the reference sequence corresponding to residues 12-417 of SEQ ID NO: 1250, or to the reference sequence corresponding to SEQ ID NO: 1250, wherein the amino acid sequence comprises one or more substitutions relative to the reference sequence corresponding to residues 12-417 of SEQ ID NO: 1250, or relative to the reference sequence corresponding to SEQ ID NO: 1250.

[0231] In some embodiments, the engineered acetate kinase comprises an amino acid sequence having at least 70%, 75%, 80%, 81%, 82%, 83%, 84%, 85%, 86%, 87%, 88%, 89%, 90%, 91%, 92%, 93%, 94%, 95%, 96%, 97%, 98%, 99%, or more sequence identity to the reference sequence corresponding to residues 12-417 of an even-numbered SEQ ID NO. of SEQ ID NOs: 1348-1386, or to the reference sequence corresponding to an even-numbered SEQ ID NO. of SEQ ID NOs: 1348-1386, wherein the amino acid sequence comprises one or more substitutions relative to the reference sequence corresponding to residues 12-417 of SEQ ID NO: 1250, or relative to the reference sequence corresponding to SEQ ID NO: 1250.

[0232] In some embodiments, the amino acid sequence of the engineered acetate kinase comprises at least a substitution at amino acid position 165, 345, 163, 320, 347, 316, 107, 348, 311, 339, 317, 22, 151, 138, 407, 223, 391, or 393, or combinations thereof, wherein the amino acid positions are relative to the reference sequence corresponding to residues 12-417 of SEQ ID NO: 1250, or relative to the reference sequence corresponding to SEQ ID NO: 1250.

[0233] In some embodiments, the amino acid sequence of the engineered acetate kinase comprises at least a substitution, or amino acid residue 165A, 345N, 163R, 320G, 347G, 316E, 107L, 348H, 311V, 339V, 317A, 22Y, 151A, 138V, 407M, 407L, 223G, 391P, 393H, or 407R, or combinations thereof, wherein the amino acid positions are relative to the reference sequence corresponding to residues 12-417 of SEQ ID NO: 1250, or relative to the reference sequence corresponding to SEQ ID NO: 1250.

[0234] In some embodiments, the amino acid sequence of the engineered acetate kinase comprises at least a substitution, or amino acid residue M165A, E345N, Q163R, I320G, S347G, Y316E, E107L, P348H, L311V, F339V, Y317A, S22Y, V151A, 1138V, 1407M, 1407L, A223G, V391P, P393H, or I407R, or combinations thereof, wherein the amino acid positions are relative to the reference sequence corresponding to residues 12-417 of SEQ ID NO: 1250, or relative to the reference sequence corresponding to SEQ ID NO: 1250.

[0235] In some embodiments, the amino acid sequence of the engineered acetate kinase comprises at least a substitution at an amino acid position set forth in Tables 7.2, 8.2, 9.2, 10.2, 11.2, 12.2, 14.2, 15.2, 16.2, 17.2, 19.2, 22.2, 23.2, 24.2, 25.2, 26.2, 27.2, and 28.2, wherein the amino acid positions are relative to the reference sequence corresponding to amino acid residues 12-417 of SEQ ID NO: 4, 254, 396, 620, 846, 1240, or 1250, or relative to the reference sequence corresponding to SEQ ID NO: 4, 254, 396, 620, 846, 1240, or 1250.

[0236] In some embodiments, the amino acid sequence of the engineered acetate kinase comprises at least one substitution set forth in Tables 7.2, 8.2, 9.2, 10.2, 11.2, 12.2, 14.2, 15.2, 16.2, 17.2, 19.2, 22.2, 23.2, 24.2, 25.2, 26.2, 27.2, and 28.2, wherein the amino acid positions are relative to the reference sequence corresponding to amino acid residues 12-417 of SEQ ID NO: 4, 254, 396, 620, 846, 1240, or 1250, or relative to the reference sequence corresponding to SEQ ID NO: 4, 254, 396, 620, 846, 1240, or 1250.

[0237] In some embodiments, the amino acid sequence of the engineered acetate kinase comprises at least a substitution or substitution set at amino acid position(s) set forth in Tables 7.2, 8.2, 9.2, 10.2, 11.2, 12.2, 14.2, 15.2, 16.2, 17.2, 19.2, 22.2, 23.2, 24.2, 25.2, 26.2, 27.2, and 28.2, wherein the amino acid positions are relative to the reference sequence corresponding to amino acid residues 12-417 of SEQ ID NO: 4, 254, 396, 620, 846, 1240, or 1250, or relative to the reference sequence corresponding to SEQ ID NO: 4, 254, 396, 620, 846, 1240, or 1250.

[0238] In some embodiments, the amino acid sequence of the engineered acetate kinase comprises at least a substitution or substitution set of an engineered acetate kinase variant set forth in Tables 7.2, 8.2, 9.2, 10.2, 11.2, 12.2, 14.2, 15.2, 16.2, 17.2, 19.2, 22.2, 23.2, 24.2, 25.2, 26.2, 27.2, and 28.2, wherein the amino acid positions are relative to the reference sequence corresponding to amino acid residues 12-417 of SEQ ID NO: 4, 254, 396, 620, 846, 1240, or 1250, or relative to the reference sequence corresponding to SEQ ID NO: 4, 254, 396, 620, 846, 1240, or 1250.

[0239] In some embodiments, the engineered acetate kinase comprises an amino acid sequence having at least 70%, 75%, 80%, 81%, 82%, 83%, 84%, 85%, 86%, 87%, 88%, 89%, 90%, 91%, 92%, 93%, 94%, 95%, 96%, 97%, 98%, 99% or more sequence identity to a reference amino acid sequence comprising a substitution or substitution set of an engineered acetate kinase variant set forth in Tables 7.2, 8.2, 9.2, 10.2, 11.2, 12.2, 14.2, 15.2, 16.2, 17.2, 19.2, 22.2, 23.2, 24.2, 25.2, 26.2, 27.2, and 28.2, wherein the amino acid positions are relative to the reference sequence corresponding to amino acid residues 12-417 of SEQ ID NO: 4, 254, 396, 620, 846, 1240, or 1250, or relative to the reference sequence corresponding to SEQ ID NO: 4, 254, 396, 620, 846, 1240, or 1250.

[0240] In some embodiments, the engineered acetate kinase comprises an amino acid sequence comprising residues 12-417 of an even-numbered SEQ ID NO. of SEQ ID NOs: 14-566, 612-868, 894-924, and 940-1390, or comprises an even-numbered SEQ ID NO. of SEQ ID NOs: 14-566, 612-868, 894-924, and 940-1390. In some embodiments, the amino acid sequence of the engineered acetate kinase optionally includes 1, 2, 3, 4, 5, 6, 7, 8, 9, or up to 10 substitutions, insertions, and/or deletions. In some embodiments, the amino acid sequence of the engineered acetate kinase includes 1, 2, 3, 4, 5, 6, 7, 8, 9, or up to 10 substitutions. In some embodiments, the amino acid sequence of the engineered acetate kinase optionally includes 1, 2, 3, 4, or 5 substitutions, insertions, and/or deletions. In some embodiments, the amino acid sequence of the engineered acetate kinase optionally includes 1, 2, 3, 4, or 5 substitutions.

[0241] In some embodiments, the engineered acetate kinase comprises an amino acid sequence comprising residues 12-417 of SEQ ID NO: 254, 396, 620, 846, 1240, or 1250, or comprises an SEQ ID NO: 254, 396, 620, 846, 1240, or 1250. In some embodiments, the amino acid sequence of the engineered acetate kinase optionally includes 1, 2, 3, 4, 5, 6, 7, 8, 9, or up to 10 substitutions, insertions, and/or deletions. In some embodiments, the amino acid sequence of the engineered acetate kinase includes 1, 2, 3, 4, 5, 6, 7, 8, 9, or up to 10 substitutions. In some embodiments, the amino acid sequence of the engineered acetate kinase optionally includes 1, 2, 3, 4, or 5 substitutions, insertions, and/or deletions. In some embodiments, the amino acid sequence of the engineered acetate kinase optionally includes 1, 2, 3, 4, or 5 substitutions.

[0242] In some embodiments, the engineered acetate kinase polypeptide has 1, 2, 3, 4, or up to 5 substitutions in the amino acid sequence. In some embodiments, the engineered acetate kinase polypeptide has 1, 2, 3, or 4 substitutions in the amino acid sequence.

[0243] In some embodiments, the substitution comprises conservative substitutions. In some embodiments, the substitution comprises non-conservative substitutions. In some embodiments, the substitutions comprise conservative and non-conservative substitutions. In some embodiments, guidance on non-conservative and conservative substitutions are provided by the variants disclosed herein.

[0244] In some embodiments, the engineered acetate kinase has acetate kinase activity and at least one improved property as compared to a reference acetate kinase.

[0245] In some embodiments, the engineered acetate kinase has increased activity in converting substrate NDP to the corresponding product NTP as compared to the reference acetate kinase. In some embodiments, the engineered acetate kinase has increased activity in converting substrate ADP, GDP, CDP, UDP, or TDP to the corresponding product ATP, GTP, CTP, UTP, or TTP, respectively. In some embodiments, the engineered acetate kinase has at least 1.1, 1.2, 1.3, 1.4, 1.5, 2, 3, 4, 5, 10, or more fold activity compared to the reference acetate kinase.

[0246] In some embodiments, the engineered acetate kinase is capable of converting NDP substrate to NTP product at greater than 30%, 40%, 50%, 60%, 70%, 80%, 85%, 90%, 91%, 92%, 93%, 94%, 95%, 96%, 97%, 98%, or 99%. In some embodiments, the engineered acetate kinase is capable of converting substrate ADP, GDP, CDP, UDP, or TDP to product ATP, GTP, CTP, UTP, or TTP, respectively, at greater than 50%, 60%, 70%, 80%, 85%, 90%, 91%, 92%, 93%, 94%, 95%, 96%, 97%, 98%, or 99%.

[0247] In some embodiments, the engineered acetate kinase has increased activity in converting substrate 2′-fluoro-nucleoside diphosphate and/or 2′-O-methyl-nucleoside diphosphate to the corresponding 2′-fluoro nucleoside triphosphate and/or 2′-O-methyl nucleoside triphosphate. In some embodiments, the engineered acetate kinase has at least 1.1, 1.2, 1.3, 1.4, 1.5, 2, 3, 4, 5, 10, or more fold activity in converting substrate 2′-fluoro-nucleoside diphosphate and/or 2′-O-methyl nucleoside diphosphate to the corresponding 2′-fluoro nucleoside triphosphate or 2′-O-methyl nucleoside triphosphate as compared to the reference acetate kinase. In some embodiments, the engineered acetate kinase has increased activity in converting substrate 2′-fluoro-ADP, 2′-fluoro-GDP, 2′-fluoro-CDP, 2′-fluoro-UDP, or 2′-fluoro-TDP to the corresponding product 2′-fluoro-ATP, 2′-fluoro-GTP, 2′-fluoro-CTP, 2′-fluoro-UTP, or 2′-fluoro-TTP, respectively. In some embodiments, the engineered acetate kinase has increased activity in converting substrate 2′-O-methyl-ADP, 2′-O-methyl-GDP, 2′-O-methyl-CDP, 2′-O-methyl-UDP, or 2′-O-methyl-TDP to the corresponding product 2′-O-methyl-ATP, 2′-O-methyl-GTP, 2′-O-methyl-CTP, 2′-O-methyl-UTP, or 2′-O-methyl-TTP. Exemplary increases in activity with 2′-modified nucleoside diphosphate substrates are provided in the Examples.

[0248] In some embodiments, the engineered acetate kinase is capable of converting substrate 2′-fluoro-NDP to product 2′-fluoro-NTP at greater than 30%, 40%, 50%, 60%, 70%, 80%, 85%, 90%, 91%, 92%, 93%, 94%, 95%, 96%, 97%, 98%, or 99%. In some embodiments, the engineered acetate kinase is capable of converting substrate 2′-fluoro-ADP, 2′-fluoro-GDP, 2′-fluoro-CDP, 2′-fluoro-UDP, or 2′-fluoro-TDP to product 2′-fluoro-ATP, 2′-fluoro-GTP, 2′-fluoro-CTP, 2′-fluoro-UTP, or 2′-fluoro-TTP, respectively, at greater than 30%, 40%, 50%, 60%, 70%, 80%, 85%, 90%, 91%, 92%, 93%, 94%, 95%, 96%, 97%, 98%, or 99%.

[0249] In some embodiments, the engineered acetate kinase is capable of converting 2′-O-methyl-NDP substrate to product 2′-O-methyl-NTP at greater than 30%, 40%, 50%, 60%, 70%, 80%, 85%, 90%, 91%, 92%, 93%, 94%, 95%, 96%, 97%, 98%, or 99%. In some embodiments, the engineered acetate kinase is capable of converting substrate 2′-O-methyl-ADP, 2′-O-methyl-GDP, 2′-O-methyl-CDP, 2′-O-methyl-UDP, or 2′-O-methyl-TDP to product 2′-O-methyl-ATP, 2′-O-methyl-GTP, 2′-O-methyl-CTP, 2′-O-methyl-UTP, or 2′-O-methyl-TTP, respectively, at greater than 30%, 40%, 50%, 60%, 70%, 80%, 85%, 90%, 91%, 92%, 93%, 94%, 95%, 96%, 97%, 98%, or 99%.

[0250] In some embodiments, the engineered acetate kinase has increased activity in converting substrate 2′-fluoro NDP-3-phosphate and/or 2′-O-methyl NDP-3′-phosphate. In some embodiments, the engineered acetate kinase has at least 1.1, 1.2, 1.3, 1.4, 1.5, 2, 3, 4, 5, 10, or more fold activity with 2′-fluoro NDP-3′-phosphate and/or increased activity on 2′-O-methyl NDP-3′-phosphate as compared to the reference acetate kinase. In some embodiments, the 2′-fluoro NDP-3′-phosphate substrate is 2′-fluoro-ADP-3′-phosphate, 2′-fluoro-GDP-3′-phosphate, 2′-fluoro-CDP-3′-phosphate, 2′-fluoro-UDP-3′-phosphate, or 2′-fluoro-TDP-3′-phosphate. In some embodiments, the 2′-O-methyl modified nucleoside monophosphate substrate is 2′-O-methyl-ADP-3′-phosphate, 2′-O-methyl-GDP-3′-phosphate, 2′-O-methyl-CDP-3′-phosphate, 2′-O-methyl-UDP-3′-phosphate, or 2′-O-methyl-TDP-3′-phosphate.

[0251] In some embodiments, the engineered acetate kinase is capable of converting substrate 2′-fluoro-NDP-3′-phosphate to product 2′-fluoro-NTP-3′-phosphate at greater than 30%, 40%, 50%, 60%, 70%, 80%, 85%, 90%, 91%, 92%, 93%, 94%, 95%, 96%, 97%, 98%, or 99%. In some embodiments, the engineered acetate kinase is capable of converting substrate 2′-fluoro-ADP-3′-phosphate, 2′-fluoro-GDP-3′-phosphate, 2′-fluoro-CDP-3′-phosphate, 2′-fluoro-UDP-3′-phosphate, or 2′-fluoro-TDP-3′-phosphate to corresponding product 2′-fluoro-ATP-3′-phosphate, 2′-fluoro-GTP-3′-phosphate, 2′-fluoro-CTP-3′-phosphate, 2′-fluoro-UTP, or 2′-fluoro-TTP-3′-phosphate, respectively, at greater than 30%, 40%, 50%, 60%, 70%, 80%, 85%, 90%, 91%, 92%, 93%, 94%, 95%, 96%, 97%, 98%, or 99%.

[0252] In some embodiments, the engineered acetate kinase is capable of converting substrate 2′-O-methyl-NDP-3′-phosphate to product 2′-O-methyl-NTP-3′-phosphate at greater than 30%, 40%, 50%, 60%, 70%, 80%, 85%, 90%, 91%, 92%, 93%, 94%, 95%, 96%, 97%, 98%, or 99%. In some embodiments, the engineered acetate kinase is capable of converting substrate 2′-O-methyl-ADP-3′-phosphate, 2′-O-methyl-GDP-3′-phosphate, 2′-O-methyl-CDP-3′-phosphate, 2′-O-methyl-UDP-3′-phosphate, or 2′-O-methyl-TDP-3′-phosphate to corresponding product 2′-O-methyl-ATP-3′-phosphate, 2′-O-methyl-GTP-3′-phosphate, 2′-O-methyl-CTP-3′-phosphate, 2′-O-methyl-UTP, or 2′—O-methyl-TTP-3′-phosphate, respectively, at greater than 30%, 40%, 50%, 60%, 70%, 80%, 85%, 90%, 91%, 92%, 93%, 94%, 95%, 96%, 97%, 98%, or 99%.

[0253] Exemplary conditions for the conversion of NDP substrate to NTP product, including conversion of 2′-fluoro-NDP to 2′-fluoro-NTP and the conversion of 2′-O-methyl NDP to 2′-O-methyl NTP are provided in the Examples.

[0254] In some embodiments, the engineered acetate kinase has an improved property selected from i) increased activity in conversion of unmodified nucleoside diphosphate to corresponding nucleotide triphosphate, ii) increased activity in conversion of substrate 2′-fluoro-nucleoside 5′-diphosphate (2′-fluoro-NDP) to product 2′-fluoro-nucleoside-5′-triphosphate (2′-fluoro-NTP), iii) increased activity in conversion of substrate 2′-O-methyl nucleoside-5′-diphosphate (2′-O-methyl-NDP) to product 2′-O-methyl nucleoside-5′-triphosphate (2′-O-methyl-NTP), iv) increased activity in conversion of substrate 2′-fluoro-nucleoside 5′-diphosphate-3′-phosphate (2′-fluoro-NDP-3′-phosphate) to product 2′-fluoro-nucleoside-5′-triphosphate-3′-phosphate, v) increased activity in conversion of substrate 2′-O-methyl-nucleoside 5′-diphosphate-3′-phosphate to product 2′-O-methyl-nucleoside 5′-triphosphate-3′-phosphate, vi) increased stability, and vii) increased thermostability, or any combinations of i), ii), iii), iv), v), vi) and vii) compared to a reference acetate kinase.

[0255] In some embodiments, the reference acetate kinase has an amino acid sequence corresponding to residues 12-417 of SEQ ID NO: 4, 254, 396, 620, 846, 1240, or 1250, or an amino acid sequence corresponding to SEQ ID NO: 4, 254, 396, 620, 846, 1240, or 1250. In some embodiments, the reference acetate kinase has an amino acid sequence corresponding to residues 12-417 of SEQ ID NO: 4, or an amino acid sequence corresponding to SEQ ID NO: 4.

[0256] In some embodiments, the present disclosure further provides an acetate kinase comprising an amino acid sequence having at least 70%, 75%, 80%, 81%, 82%, 83%, 84%, 85%, 86%, 87%, 88%, 89%, 90%, 91%, 92%, 93%, 94%, 95%, 96%, 97%, 98%, 99% or more sequence identity to
[0257] (a) a sequence corresponding to residues 12 to 418 of SEQ ID NO: 2;
   [0258] a sequence corresponding to residues 12 to 417 of SEQ ID NO: 4;
   [0259] a sequence corresponding to residues 12 to 414 of SEQ ID NO: 6;
   [0260] a sequence corresponding to residues 12 to 417 of SEQ ID NO: 8;
   [0261] a sequence corresponding to residues 12 to 415 of SEQ ID NO: 10;
   [0262] a sequence corresponding to residues 12 to 417 of SEQ ID NO: 12; or
[0263] (b) a sequence corresponding to SEQ ID NO: 2;
   [0264] a sequence corresponding to SEQ ID NO: 4;
   [0265] a sequence corresponding to SEQ ID NO: 6;
   [0266] a sequence corresponding to SEQ ID NO: 8;
   [0267] a sequence corresponding to SEQ ID NO: 10; or
   [0268] a sequence corresponding to SEQ ID NO: 12.

[0269] In some embodiments, the present disclosure provides an acetate kinase comprising an amino acid sequence comprising:
[0270] (a) residues 12 to 418 of SEQ ID NO: 2;
   [0271] residues 12 to 417 of SEQ ID NO: 4;
   [0272] residues 12 to 414 of SEQ ID NO: 6;
   [0273] residues 12 to 417 of SEQ ID NO: 8;
   [0274] residues 12 to 415 of SEQ ID NO: 10;
   [0275] residues 12 to 417 of SEQ ID NO: 12; or
[0276] (b) SEQ ID NO: 2;
   [0277] SEQ ID NO: 4;
   [0278] SEQ ID NO: 6;
   [0279] SEQ ID NO: 8;
   [0280] SEQ ID NO: 10; or
   [0281] SEQ ID NO: 12.

[0282] In some embodiments, the engineered acetate kinase is provided in the form of a fusion polypeptide. In some embodiments, the engineered acetate kinase is fused to variety of polypeptide sequences, such as, by way of example and not limitation, polypeptide tags that can be used for detection and/or purification. In some embodiments, the fusion protein of the engineered acetate kinase comprises a glycine-histidine or histidine-tag (His-tag). In some embodiments, the fusion protein of the engineered acetate kinase comprises a polylysine, e.g., 2-12 lysine units, such as for conjugation to a support medium. In some embodiments, the fusion protein of the engineered acetate kinase comprises an epitope tag, such as c-myc, FLAG, V5, or hemagglutinin (HA). In some embodiments, the fusion protein of the engineered acetate kinase comprises a GST, SUMO, Strep, MBP, or GFP tag. In some embodiments, the fusion is to the amino (N—) terminus of engineered acetate kinase polypeptide. In some embodiments, the fusion is to the carboxy (C—) terminus of the acetate kinase polypeptide.

[0283] In some embodiments, the present disclosure further provides functional fragments or biologically active fragments of engineered acetate kinase polypeptides described herein. Thus, for each and every embodiment herein of an engineered acetate kinase, a functional fragment or biologically active fragment of the engineered acetate kinase is provided herewith. In some embodiments, a functional fragment or biologically active fragments of an engineered acetate kinase comprises at least about 90%, 91%, 92%, 93%, 94%, 95%, 96%, 97%, 98%, or 99% of the activity of the acetate kinase polypeptide from which it was derived (i.e., the parent acetate kinase). In some embodiments, functional fragments or biologically active fragments comprise at least about 90%, 91%, 92%, 93%, 94%, 95%, 96%, 97%, 98%, or 99% of the parent sequence of the acetate kinase. In some embodiments the functional fragment will be truncated by less than 5, less than 10, less than 15, less than 10, less than 25, less than 30, less than 35, less than 40, less than 45, and less than 50 amino acids.

[0284] In some embodiments, a functional fragment of an engineered acetate kinase herein comprises at least 70%, 75%, 80%, 81%, 82%, 83%, 84%, 85%, 90%, 91%, 92%, 93%, 94%, 95%, 96%, 97%, 98%, or 99% of the parent sequence of the engineered acetate kinase. In some embodiments, the functional fragment will be truncated by less than 5, less than 10, less than 15, less than 10, less than 25, less than 30, less than 35, less than 40, less than 45, less than 50, less than 55, less than 60, less than 65, or less than 70 amino acids.

[0285] In some embodiments, the functional fragments or biologically active fragments of the engineered acetate kinase polypeptide described herein include at least a mutation or mutation set in the amino acid sequence of an engineered acetate kinase described herein. Accordingly, in some embodiments, the functional fragments or biologically active fragments of the engineered acetate kinase displays the enhanced or improved property associated with the mutation or mutation set in the parent acetate kinase.

[0286] In some embodiments, the engineered acetate kinase is purified, as described herein. In some embodiments, the purified preparation has the engineered acetate kinase at least 60%, 70%, 80%, 85%, 90%, or 95% greater of the protein content of the preparation.

[0287] In some embodiments, an engineered acetate kinase described herein is provided immobilized on a substrate or support medium, such as a solid substrate, a porous substrate, a membrane, or particles. The polypeptide can be entrapped in matrixes or membranes. In some embodiments, matrices include polymeric materials such as calcium-alginate, agar, k-carrageenin, polyacrylamide, and collagen. In some embodiments, the solid matrices, includes, among others, activated carbon, porous ceramic, and diatomaceous earth. In some embodiments, the matrix is a particle, a membrane, or a fiber. Types of membranes include, among others, nylon, cellulose, polysulfone, or polyacrylate.

[0288] In some embodiments, the engineered acetate kinase is immobilized on a support material. In some embodiments, the polypeptide is adsorbed on the support material. In some embodiments, the polypeptide is immobilized on the support material by covalent attachment. Support materials include, among others, inorganic materials, such as alumina, silica, porous glass, ceramics, diatomaceous earth, clay, and bentonite, or organic materials, such as cellulose (CMC, DEAE-cellulose), starch, activated carbon, polyacrylamide, polymethacrylate, polyacrylate, polystyrene, and ion-exchange resins, such as Amberlite, Sephadex, and Dowex.

[0289] In some other embodiments, solid supports useful for immobilizing the enzyme/polypeptide in the present disclosure, include beads or resins comprising polymethacrylate or polyacrylate with epoxide functional groups, polymethacrylate or polyacrylate with amino epoxide functional groups, styrene/DVB copolymer, or polymethacrylate or polyacrylate with octadecyl functional groups. Exemplary solid supports useful for immobilizing the enzyme/polypeptide include, but are not limited to, EnginZyme (including, EziG-1, EziG-1, and EziG-3), chitosan beads, Eupergit C, and SEPABEADs (Mitsubishi) (including EC-EP, EC-HFA/S, EXA252, EXE119 and EXE120).

[0290] Methods of enzyme immobilization are known in the art. The engineered polypeptides can be bound non-covalently or covalently. Various methods for conjugation and immobilization of enzymes to solid supports (e.g., resins, membranes, beads, glass, etc.) are known in the art (see e.g., Yi et al., Proc. Biochem., 2007, 42 (5): 895-898; Martin et al., Appl. Microbiol. Biotechnol., 2007, 76 (4): 843-85; Koszelewski et al., J. Mol. Cat. B: Enzymatic, 2010, 63:39-44; Truppo et al., Org. Proc. Res. Dev., published online: dx.doi.org/10.1021/op200157c; Hermanson, Bioconjugate Techniques, 2nd Ed., Academic Press, Cambridge, MA (2008); Mateo et al., Biotechnol. Prog., 2002, 18 (3): 629-34; and “Bioconjugation Protocols: Strategies and Methods,” In Methods in Molecular Biology, Niemeyer (ed.), Humana Press, New York, NY (2004); the disclosures of each which are incorporated by reference herein).

### Polynucleotides Encoding Engineered Polypeptides, Expression Vectors and Host Cells

[0291] In another aspect, the present disclosure provides recombinant polynucleotides encoding the engineered acetate kinase described herein. In some embodiments, the recombinant polynucleotides are operably linked to one or more heterologous regulatory sequences that control gene expression to create a recombinant polynucleotide construct capable of expressing the engineered acetate kinase. In some embodiments, an expression construct containing at least one heterologous polynucleotide encoding the engineered acetate kinase polypeptide(s) is introduced into appropriate host cells to express the corresponding acetate kinase polypeptide(s).

[0292] As will be apparent to the skilled artisan, availability of a protein sequence and the knowledge of the codons corresponding to the various amino acids provide a description of all the polynucleotides capable of encoding the subject polypeptides. The degeneracy of the genetic code, where the same amino acids are encoded by alternative or synonymous codons, allows an extremely large number of nucleic acids to be made, all of which encode an engineered acetate kinase of the present disclosure. Thus, the present disclosure provides methods and compositions for the production of each and every possible variation of polynucleotides that could be made that encode the engineered acetate kinase polypeptides described herein by selecting combinations based on the possible codon choices, and all such polynucleotide variants are to be considered specifically disclosed for any polypeptide described herein, including the amino acid sequences presented in the Examples (e.g., Tables 7.2, 8.2, 9.2, 10.2, 11.2, 12.2, 14.2, 15.2, 16.2, 17.2, 19.2, 22.2, 23.2, 24.2, 25.2, 26.2, 27.2, or 28.2) and in the Sequence Listing.

[0293] In some embodiments, the codons are preferably optimized for utilization by the chosen host cell for protein production. In some embodiments, preferred codons in bacteria are used for expression in bacteria. In some embodiments, preferred codons in fungal cells are used for expression in fungal cells. In some embodiments, preferred codons in insect cells are used for expression in insect cells. In some embodiments, preferred codons in mammalian cells are used for expression in mammalian cells. In some embodiments, codon optimized polynucleotides encoding an engineered acetate kinase polypeptide described herein contain preferred codons at about 40%, 50%, 60%, 70%, 80%, 90%, or greater than 90% of the codon positions in the full-length coding region.

[0294] Accordingly, in some embodiments, a recombinant polynucleotide of the present disclosure comprises a polynucleotide sequence encoding an engineered acetate kinase polypeptide described herein. In some embodiments, the polynucleotide sequence of the recombinant polynucleotide is codon optimized. In some embodiments, the polynucleotide sequence of the recombinant polynucleotide is codon optimized for expression in eukaryotic or prokaryotic cells, as further discussed below.

[0295] In some embodiments, the recombinant polynucleotide comprises a polynucleotide sequence encoding an engineered acetate kinase comprising an amino acid sequence having at least 70%, 75%, 80%, 81%, 82%, 83%, 84%, 85%, 86%, 87%, 88%, 89%, 90%, 91%, 92%, 93%, 94%, 95%, 96%, 97%, 98%, 99%, or more sequence identity to a reference sequence corresponding to amino acid residues 12-417 of an even-numbered SEQ ID NO. of SEQ ID NOs: 4, 14-566, 612-868, 894-924, and 940-1390, or to a reference sequence corresponding to an even-numbered SEQ ID NO. of SEQ ID NOs: 4, 14-566, 612-868, 894-924, and 940-1390, or to a reference sequence corresponding to an even-numbered SEQ ID NO. of SEQ ID NOs: 4, 14-566, 612-868, 894-924, and 940-1390, or to a reference sequence corresponding to an even-numbered SEQ ID NO. of SEQ ID NOs: 4, 14-566, 612-868, 894-924, and 940-1390, wherein the amino acid sequence comprises one or more substitutions relative to the reference sequence corresponding to amino acid residues 12-417 of SEQ ID NO: 4, 14-566, 612-868, 894-924, and 940-1390, or to a reference sequence corresponding to an even-numbered SEQ ID NO. of SEQ ID NOs: 4, 14-566, 612-868, 894-924, and 940-1390, or relative to the reference sequence corresponding to SEQ ID NO: 4, 254, 396, or 620.

[0296] In some embodiments, the recombinant polynucleotide comprises a polynucleotide sequence encoding an engineered acetate kinase comprising an amino acid sequence having at least 70%, 75%, 80%, 81%, 82%, 83%, 84%, 85%, 86%, 87%, 88%, 89%, 90%, 91%, 92%, 93%, 94%, 95%, 96%, 97%, 98%, 99%, or more sequence identity to a reference sequence corresponding to amino acid residues 12-417 of SEQ ID NO: 4, 254, 396, 620, 846, 1240, or 1250, or to a reference sequence corresponding to SEQ ID NO: 4, 254, 396, 620, 846, 1240, or 1250, wherein the amino acid sequence comprises one or more substitutions relative to the reference sequence corresponding to amino acid residues 12-417 of SEQ ID NO: 4, 254, 396, 620, 846, 1240, or 1250, or relative to the reference sequence corresponding to SEQ ID NO: 4, 254, 396, 620, 846, 1240, or 1250.

[0297] In some embodiments, the recombinant polynucleotide comprises a polynucleotide sequence encoding an engineered acetate kinase comprising an amino acid sequence having at least 70%, 75%, 80%, 81%, 82%, 83%, 84%, 85%, 86%, 87%, 88%, 89%, 90%, 91%, 92%, 93%, 94%, 95%, 96%, 97%, 98%, 99%, or more sequence identity to the reference sequence corresponding to amino acid residues 12-417 of SEQ ID NO: 4, or to the reference sequence corresponding to SEQ ID NO: 4, wherein the amino acid sequence comprises one or more substitutions relative to the reference sequence corresponding to amino acid residues 12-417 of SEQ ID NO: 4, or relative to the reference sequence corresponding to SEQ ID NO: 4.

[0298] In some embodiments, the recombinant polynucleotide comprises a polynucleotide sequence encoding an engineered acetate kinase comprising an amino acid sequence having at least 70%, 75%, 80%, 81%, 82%, 83%, 84%, 85%, 86%, 87%, 88%, 89%, 90%, 91%, 92%, 93%, 94%, 95%, 96%, 97%, 98%, 99%, or more sequence identity to the reference sequence corresponding to amino acid residues 12-417 of SEQ ID NO: 254, 396, 620, 846, 1240, or 1250, or to the reference sequence corresponding to SEQ ID NO: 254, 396, 620, 846, 1240, or 1250, wherein the amino acid sequence comprises one or more substitutions relative to the reference sequence corresponding to amino acid residues 12-417 of SEQ ID NO: 4, or relative to the reference sequence corresponding to SEQ ID NO: 4.

[0299] In some embodiments, the recombinant polynucleotide comprises a polynucleotide sequence encoding an engineered acetate kinase comprising an amino acid sequence having at least 70%, 75%, 80%, 81%, 82%, 83%, 84%, 85%, 86%, 87%, 88%, 89%, 90%, 91%, 92%, 93%, 94%, 95%, 96%, 97%, 98%, 99%, or more sequence identity to a reference sequence corresponding to amino acid residues 12-417 of an even-numbered SEQ ID NO. of SEQ ID NOs: 14-566, 612-868, 894-924, and 940-1390, or to a reference sequence corresponding to an even-numbered SEQ ID NO. of SEQ ID NOs: 14-566, 612-868, 894-924, and 940-1390, wherein the amino acid sequence comprises one or more substitutions relative to the reference sequence corresponding to amino acid residues 12-417 of SEQ ID NO: 4, or relative to the reference sequence corresponding to SEQ ID NO: 4.

[0300] In some embodiments, the recombinant polynucleotide comprises a polynucleotide sequence encoding an engineered acetate kinase comprising an amino acid sequence comprising at least a substitution at amino acid position 4, 5, 10, 11, 13, 14, 15, 16, 18, 19, 22, 26, 27, 28, 30, 31, 32, 36, 38, 41, 43, 46, 49, 50, 52, 54, 55, 60, 61, 62, 63, 64, 65, 66, 68, 69, 72, 74, 75, 76, 77, 79, 80, 87, 88, 91, 97, 98, 107, 113, 114, 110, 115, 116, 117, 118, 119, 120, 121, 123, 126, 127, 128, 130, 133, 134, 135, 136, 137, 138, 139, 141, 142, 143, 144, 145, 146, 147, 148, 149, 150, 151, 152, 156, 157, 160, 163, 165, 167, 170, 176, 180, 182, 183, 189, 190, 192, 196, 199, 201, 204, 205, 207, 208, 209, 210, 211, 212, 213, 216, 217, 223, 225, 227, 229, 231, 238, 240, 242, 246, 248, 249, 251, 257, 258, 260, 261, 263, 264, 265, 266, 268, 269, 270, 273, 276, 277, 279, 280, 284, 285, 288, 291, 292, 293, 295, 297, 298, 299, 300, 301, 302, 303, 304, 306, 308, 309, 310, 311, 312, 313, 314, 315, 316, 317, 318, 320, 323, 324, 329, 339, 340, 343, 344, 345, 347, 348, 349, 350, 352, 353, 354, 355, 356, 358, 360, 361, 363, 364, 369, 370, 372, 373, 374, 375, 376, 383, 384, 385, 387, 390, 391, 392, 393, 394, 395, 398, 400, 402, 404, 405, 406, 407, 408, or 409, or combinations thereof, wherein the amino acid positions are relative to the reference sequence corresponding to amino acid residues 12-417 of SEQ ID NO: 4, or relative to the reference sequence corresponding to SEQ ID NO: 4.

[0301] In some embodiments, the recombinant polynucleotide comprises a polynucleotide sequence encoding an engineered acetate kinase comprising an amino acid sequence comprising at least a substitution at amino acid position 32, 54, 88, 147, 209, 277, 279, 293, 299, 313, or 344, or combinations thereof, wherein the amino acid positions are relative to the reference sequence corresponding to amino acid residues 12-417 of SEQ ID NO: 4, or relative to the reference sequence corresponding to SEQ ID NO: 4.

[0302] In some embodiments, the recombinant polynucleotide comprises a polynucleotide sequence encoding an engineered acetate kinase comprising an amino acid sequence comprising at least a substitution or substitution set at amino acid position(s) 98, 404, 137/144, 77, 75, 115, 136, 147, 147/308, 15, 141, 146, 120/135, 160, 217, 135, 148, 301, 130, 11/50, 156, 16, 144/145, 348, 144, 26, 66, 138, 49, 157, 196, 270, 170, 142, 41/97, 369, 74, 52, 352, 373, 27, 280, 137, 126, 285, 19, 46, 276, 145, 205, 313, 348, 372, 69, 68, 392, 72, 50, 69/148/348/372/392, 52/69/148/348/392, 52/148/348/372, 147/205/313/373/408, 69/148/348/392, 52/348/372, 69/148/348, 52/136/348/372, 148/348, 348/372/392, 52/348/392, 136/348, 348/372, 69/136/348, 136/313/352/373/408, 147/313/352/408, 52/148/348, 148/348/372, 52/136/348, 52/69/348/372/392, 348/392, 147/313, 69/148/372/392, 136/148/348/392, 136/372, 69/348/392, 147/205, 69/136/372/392, 69/136/372, 147/205/352, 148/372, 52/69/348/372, 52/69/348, 136/373, 68/136/313/408, 136/205/313/352/408, 147/352/408, 52/148/372, 205/313/352, 313/352/408, 143/313/408, 136/352/373, 147/352, 68/313, 136/205/408, 68/136/408, 313/408, 69/148, 52/372/392, 148/392, 5/52/69/372/392, 136/348/392, 136/313/352, 136/313, 52/148, 372/392, 52/69/372, 136/205/313, 205/208/313, 136/352/408, 205/313, 52/136, 313/352, 136/148/348, 136/408, 136/392, 68/136, 136/205, 69/136, 52/136/372/392, 52/148/392, 68/136/205/352, 205/352/373/408, 69/392, 136/205/352, 205/408, 205/352/408, 408, 52/69, 52/69/392, 69/136/348/372, 69/136/148/392, 68/352/373/408, 68/352, 52/392, 136/147/205/373/408, or 205/352, wherein the amino acid positions are relative to the reference sequence corresponding to amino acid residues 12-417 of SEQ ID NO: 4, or relative to the reference sequence corresponding to SEQ ID NO: 4.

[0303] In some embodiments, the recombinant polynucleotide comprises a polynucleotide sequence encoding an engineered acetate kinase comprising an amino acid sequence comprising at least a substitution at an amino acid position set forth in Tables 7.2, 8.2, 9.2, 10.2, 11.2, 12.2, 14.2, 15.2, 16.2, 17.2, 19.2, 22.2, 23.2, 24.2, 25.2, 26.2, 27.2, and 28.2, wherein the amino acid positions are relative to the reference sequence corresponding to amino acid residues 12-417 of SEQ ID NO: 4, or relative to the reference sequence corresponding to SEQ ID NO: 4.

[0304] In some embodiments, the recombinant polynucleotide comprises a polynucleotide sequence encoding an engineered acetate kinase comprising an amino acid sequence comprising at least one substitution set forth in Tables 7.2, 8.2, 9.2, 10.2, 11.2, 12.2, 14.2, 15.2, 16.2, 17.2, 19.2, 22.2, 23.2, 24.2, 25.2, 26.2, 27.2, and 28.2, wherein the amino acid positions are relative to the reference sequence corresponding to amino acid residues 12-417 of SEQ ID NO: 4, or relative to the reference sequence corresponding to SEQ ID NO: 4.

[0305] In some embodiments, the recombinant polynucleotide comprises a polynucleotide sequence encoding an engineered acetate kinase comprising an amino acid sequence comprising at least a substitution or substitution set at amino acid position(s) set forth in Tables 7.2, 8.2, 9.2, 10.2, 11.2, 12.2, 14.2, 15.2, 16.2, 17.2, 19.2, 22.2, 23.2, 24.2, 25.2, 26.2, 27.2, and 28.2, wherein the amino acid positions are relative to the reference sequence corresponding to amino acid residues 12-417 of SEQ ID NO: 4, or relative to the reference sequence corresponding to SEQ ID NO: 4.

[0306] In some embodiments, the recombinant polynucleotide comprises a polynucleotide sequence encoding an engineered acetate kinase comprising an amino acid sequence comprising at least a substitution or substitution set of an engineered acetate kinase variant set forth in Tables 7.2, 8.2, 9.2, 10.2, 11.2, 12.2, 14.2, 15.2, 16.2, 17.2, 19.2, 22.2, 23.2, 24.2, 25.2, 26.2, 27.2, and 28.2, wherein the amino acid positions are relative to the reference sequence corresponding to amino acid residues 12-417 of SEQ ID NO: 4, or relative to the reference sequence corresponding to SEQ ID NO: 4.

[0307] In some embodiments, the recombinant polynucleotide comprises a polynucleotide sequence encoding an engineered acetate kinase comprising an amino acid sequence comprising an amino acid sequence having at least 70%, 75%, 80%, 81%, 82%, 83%, 84%, 85%, 86%, 87%, 88%, 89%, 90%, 91%, 92%, 93%, 94%, 95%, 96%, 97%, 98%, 99% or more sequence identity to a reference amino acid sequence comprising a substitution or substitution set of an engineered acetate kinase variant set forth in Tables 7.2, 8.2, 9.2, 10.2, 11.2, 12.2, 14.2, 15.2, 16.2, 17.2, 19.2, 22.2, 23.2, 24.2, 25.2, 26.2, 27.2, and 28.2, wherein the amino acid positions are relative to the reference sequence corresponding to amino acid residues 12-417 of SEQ ID NO: 4, or relative to the reference sequence corresponding to SEQ ID NO: 4.

[0308] In some embodiments, the recombinant polynucleotide comprises a polynucleotide sequence encoding an engineered acetate kinase comprising an amino acid sequence having at least 70%, 75%, 80%, 81%, 82%, 83%, 84%, 85%, 86%, 87%, 88%, 89%, 90%, 91%, 92%, 93%, 94%, 95%, 96%, 97%, 98%, 99%, or more sequence identity to the reference sequence corresponding to residues 12-417 of SEQ ID NO: 254, 396, 620, 846, 1240, or 1250, or to the reference sequence corresponding to SEQ ID NO: 254, 396, 620, 846, 1240, or 1250.

[0309] In some embodiments, the recombinant polynucleotide comprises a polynucleotide sequence encoding an engineered acetate kinase comprising an amino acid sequence having at least 70%, 75%, 80%, 81%, 82%, 83%, 84%, 85%, 86%, 87%, 88%, 89%, 90%, 91%, 92%, 93%, 94%, 95%, 96%, 97%, 98%, 99%, or more sequence identity to a reference sequence corresponding to residues 12-417 of an even-numbered SEQ ID NO. of SEQ ID NOs: 14-566, 612-868, 894-924, and 940-1390, or to a reference sequence corresponding to an even-numbered SEQ ID NO. of SEQ ID NOs: 14-566, 612-868, 894-924, and 940-1390.

[0310] In some embodiments, the recombinant polynucleotide comprises a polynucleotide sequence encoding an engineered acetate kinase comprising an amino acid sequence having at least 70%, 75%, 80%, 81%, 82%, 83%, 84%, 85%, 86%, 87%, 88%, 89%, 90%, 91%, 92%, 93%, 94%, 95%, 96%, 97%, 98%, 99%, or more sequence identity to the reference sequence corresponding to residues 12-417 of SEQ ID NO: 254, 396, 620, 846, 1240, or 1250, or to the reference sequence corresponding to SEQ ID NO: 254, 396, 620, 846, 1240, or 1250, wherein the amino acid sequence comprises one or more substitutions relative to the reference sequence corresponding to residues 12-417 of SEQ ID NO: 254, 396, 620, 846, 1240, or 1250, or relative to the reference sequence corresponding to SEQ ID NO: 254, 396, 620, 846, 1240, or 1250.

[0311] In some embodiments, the recombinant polynucleotide comprises a polynucleotide sequence encoding an engineered acetate kinase comprising an amino acid sequence having at least 70%, 75%, 80%, 81%, 82%, 83%, 84%, 85%, 86%, 87%, 88%, 89%, 90%, 91%, 92%, 93%, 94%, 95%, 96%, 97%, 98%, 99%, or more sequence identity to the reference sequence corresponding to residues 12-417 of an even-numbered SEQ ID NO. of SEQ ID NOs: 14-566, 612-868, 894-924, and 940-1390, or to the reference sequence corresponding to an even-numbered SEQ ID NO. of SEQ ID NOs: 14-566, 612-868, 894-924, and 940-1390, wherein the amino acid sequence comprises one or more substitutions relative to the reference sequence corresponding to residues 12-417 of SEQ ID NO: 254, 396, 620, 846, 1240, or 1250, or relative to the reference sequence corresponding to SEQ ID NO: 254, 396, 620, 846, 1240, or 1250.

[0312] In some embodiments, the recombinant polynucleotide comprises a polynucleotide sequence encoding an engineered acetate kinase comprising an amino acid sequence comprising at least a substitution at amino acid position 4, 5, 10, 11, 13, 14, 15, 16, 18, 19, 22, 26, 27, 28, 30, 31, 32, 36, 38, 41, 43, 46, 49, 50, 52, 54, 55, 60, 61, 62, 63, 64, 65, 66, 68, 69, 72, 74, 75, 76, 77, 79, 80, 87, 88, 91, 97, 98, 107, 113, 114, 110, 115, 116, 117, 118, 119, 120, 121, 123, 126, 127, 128, 130, 133, 134, 135, 136, 137, 138, 139, 141, 142, 143, 144, 145, 146, 147, 148, 149, 150, 151, 152, 156, 157, 160, 163, 165, 167, 170, 176, 180, 182, 183, 189, 190, 192, 196, 199, 201, 204, 205, 207, 208, 209, 210, 211, 212, 213, 216, 217, 223, 225, 227, 229, 231, 238, 240, 242, 246, 248, 249, 251, 257, 258, 260, 261, 263, 264, 265, 266, 268, 269, 270, 273, 276, 277, 279, 280, 284, 285, 288, 291, 292, 293, 295, 297, 298, 299, 300, 301, 302, 303, 304, 306, 308, 309, 310, 311, 312, 313, 314, 315, 316, 317, 318, 320, 323, 324, 329, 339, 340, 343, 344, 345, 347, 348, 349, 350, 352, 353, 354, 355, 356, 358, 360, 361, 363, 364, 369, 370, 372, 373, 374, 375, 376, 383, 384, 385, 387, 390, 391, 392, 393, 394, 395, 398, 400, 402, 404, 405, 406, 407, 408, or 409, or combinations thereof, wherein the amino acid positions are relative to the reference sequence corresponding to residues 12-417 of SEQ ID NO: 254, 396, 620, 846, 1240, or 1250, or relative to the reference sequence corresponding to SEQ ID NO: 254, 396, 620, 846, 1240, or 1250.

[0313] In some embodiments, the recombinant polynucleotide comprises a polynucleotide sequence encoding an engineered acetate kinase comprising an amino acid sequence comprising at least a substitution at amino acid position 32, 54, 88, 147, 209, 277, 279, 293, 299, 313, or 344, or combinations thereof, wherein the amino acid positions are relative to the reference sequence corresponding to amino acid residues 12-417 of SEQ ID NO: 254, 396, 620, 846, 1240, or 1250, or relative to the reference sequence corresponding to SEQ ID NO: 254, 396, 620, 846, 1240, or 1250.

[0314] In some embodiments, the recombinant polynucleotide comprises a polynucleotide sequence encoding an engineered acetate kinase comprising an amino acid sequence having at least 70%, 75%, 80%, 81%, 82%, 83%, 84%, 85%, 86%, 87%, 88%, 89%, 90%, 91%, 92%, 93%, 94%, 95%, 96%, 97%, 98%, 99%, or more sequence identity to the reference sequence corresponding to residues 12-417 of SEQ ID NO: 254, or to the reference sequence corresponding to SEQ ID NO: 254, wherein the amino acid sequence comprises one or more substitutions relative to the reference sequence corresponding to residues 12-417 of SEQ ID NO: 254, or relative to the reference sequence corresponding to SEQ ID NO: 254.

[0315] In some embodiments, the recombinant polynucleotide comprises a polynucleotide sequence encoding an engineered acetate kinase comprising an amino acid sequence having at least 70%, 75%, 80%, 81%, 82%, 83%, 84%, 85%, 86%, 87%, 88%, 89%, 90%, 91%, 92%, 93%, 94%, 95%, 96%, 97%, 98%, 99%, or more sequence identity to the reference sequence corresponding to residues 12-417 of an even-numbered SEQ ID NO. of SEQ ID NOs: 396-566, or to the reference sequence corresponding to an even-numbered SEQ ID NO. of SEQ ID NOs: 396-566, wherein the amino acid sequence comprises one or more substitutions relative to the reference sequence corresponding to residues 12-417 of SEQ ID NO: 254, or relative to the reference sequence corresponding to SEQ ID NO: 254.

[0316] In some embodiments, the recombinant polynucleotide comprises a polynucleotide sequence encoding an engineered acetate kinase comprising an amino acid sequence comprising at least a substitution or substitution set at amino acid position(s) 299, 300, 303, 317, 144, 374, 63, 301, 134, 60, 65, 68, 55, 301/308, 110, 139, 64, 192, 80, 61, 249, 376, 143, 395, 217, 248, 295, 285, 74, 62, 76, or 79, wherein the amino acid positions are relative to the reference sequence corresponding to residues 12-417 of SEQ ID NO: 254, or relative to the reference sequence corresponding to SEQ ID NO: 254.

[0317] In some embodiments, the recombinant polynucleotide comprises a polynucleotide sequence encoding an engineered acetate kinase comprising an amino acid sequence having at least 70%, 75%, 80%, 81%, 82%, 83%, 84%, 85%, 86%, 87%, 88%, 89%, 90%, 91%, 92%, 93%, 94%, 95%, 96%, 97%, 98%, 99%, or more sequence identity to the reference sequence corresponding to residues 12-417 of SEQ ID NO: 396, or to the reference sequence corresponding to SEQ ID NO: 396, wherein the amino acid sequence comprises one or more substitutions relative to the reference sequence corresponding to residues 12-417 of SEQ ID NO: 396, or relative to the reference sequence corresponding to SEQ ID NO: 396.

[0318] In some embodiments, the recombinant polynucleotide comprises a polynucleotide sequence encoding an engineered acetate kinase comprising an amino acid sequence having at least 70%, 75%, 80%, 81%, 82%, 83%, 84%, 85%, 86%, 87%, 88%, 89%, 90%, 91%, 92%, 93%, 94%, 95%, 96%, 97%, 98%, 99%, or more sequence identity to the reference sequence corresponding to residues 12-417 of an even-numbered SEQ ID NO. of SEQ ID NOs: 612-802, or to the reference sequence corresponding to an even-numbered SEQ ID NO. of SEQ ID NOs: 612-802, wherein the amino acid sequence comprises one or more substitutions relative to the reference sequence corresponding to residues 12-417 of SEQ ID NO: 396, or relative to the reference sequence corresponding to SEQ ID NO: 396.

[0319] In some embodiments, the recombinant polynucleotide comprises a polynucleotide sequence encoding an engineered acetate kinase comprising an amino acid sequence comprising at least a substitution or substitution set at amino acid position(s) 55/303/308/343/344, 32/55/344, 55/303/308/344, 295/303/308, 60/300/301/317, 344, 300/301/316/317/374, 55/344, 374, 295/308, 300/301/317, 301/317, 55/303/308, 300/301/374, 308, 317, 288, 320, 298, 312, 353, 348, 375, 304, 216, 217, 391, 292, 285, 225, 373, 300, 352, 354, 133, 293, 309, 190, 314, 297, 393, 350, 301, 372, 310, 299, 291, 284, or 313, wherein the amino acid positions are relative to the reference sequence corresponding to residues 12-417 of SEQ ID NO: 396, or relative to the reference sequence corresponding to SEQ ID NO: 396.

[0320] In some embodiments, the recombinant polynucleotide comprises a polynucleotide sequence encoding an engineered acetate kinase comprising an amino acid sequence having at least 70%, 75%, 80%, 81%, 82%, 83%, 84%, 85%, 86%, 87%, 88%, 89%, 90%, 91%, 92%, 93%, 94%, 95%, 96%, 97%, 98%, 99%, or more sequence identity to the reference sequence corresponding to residues 12-417 of SEQ ID NO: 620, or to the reference sequence corresponding to SEQ ID NO: 620, wherein the amino acid sequence comprises one or more substitutions relative to the reference sequence corresponding to residues 12-417 of SEQ ID NO: 620, or relative to the reference sequence corresponding to SEQ ID NO: 620.

[0321] In some embodiments, the recombinant polynucleotide comprises a polynucleotide sequence encoding an engineered acetate kinase comprising an amino acid sequence having at least 70%, 75%, 80%, 81%, 82%, 83%, 84%, 85%, 86%, 87%, 88%, 89%, 90%, 91%, 92%, 93%, 94%, 95%, 96%, 97%, 98%, 99%, or more sequence identity to the reference sequence corresponding to residues 12-417 of an even-numbered SEQ ID NO. of SEQ ID NOs: 804-868, 894-924, 940-980, 1240, 1250, and 1388-1390, or to the reference sequence corresponding to an even-numbered SEQ ID NO. of SEQ ID NOs: 804-868, 894-924, 940-980, 1240, 1250, and 1388-1390, wherein the amino acid sequence comprises one or more substitutions relative to the reference sequence corresponding to residues 12-417 of SEQ ID NO: 620, or relative to the reference sequence corresponding to SEQ ID NO: 620.

[0322] In some embodiments, the recombinant polynucleotide comprises a polynucleotide sequence encoding an engineered acetate kinase comprising an amino acid sequence comprising at least a substitution at amino acid position 350, 376, 393, 372, 279, 300, 291, 314, 10, 285, 373, 317, 238, 216, 304, 309, 293, 246, 27, 391, 196, 299, or 349, or combinations thereof, wherein the amino acid positions are relative to the reference sequence corresponding to residues 12-417 of SEQ ID NO: 620, or relative to the reference sequence corresponding to SEQ ID NO: 620.

[0323] In some embodiments, the recombinant polynucleotide comprises a polynucleotide sequence encoding an engineered acetate kinase comprising an amino acid sequence comprising at least a substitution or substitution set at amino acid position(s) 251, 242, 393, 18, 299, 316, 344, 400, 340, 347, 217, 394, 22, 309, 372, 285, 291, 297, 300, 279, 43, 225, 216, 352, 302, 292, 353, 189, 375, 279/293, 32/54/88/209/277/279/293, 32/38/54/88/209/277/279/293, or 16/32/38/54/88/209/277/279/293, wherein the amino acid positions are relative to the reference sequence corresponding to residues 12-417 of SEQ ID NO: 620, or relative to the reference sequence corresponding to SEQ ID NO: 620.

[0324] In some embodiments, the recombinant polynucleotide comprises a polynucleotide sequence encoding an engineered acetate kinase comprising an amino acid sequence having at least 70%, 75%, 80%, 81%, 82%, 83%, 84%, 85%, 86%, 87%, 88%, 89%, 90%, 91%, 92%, 93%, 94%, 95%, 96%, 97%, 98%, 99%, or more sequence identity to the reference sequence corresponding to residues 12-417 of SEQ ID NO: 846, or to the reference sequence corresponding to SEQ ID NO: 846, wherein the amino acid sequence comprises one or more substitutions relative to the reference sequence corresponding to residues 12-417 of SEQ ID NO: 846, or relative to the reference sequence corresponding to SEQ ID NO: 846.

[0325] In some embodiments, the recombinant polynucleotide comprises a polynucleotide sequence encoding an engineered acetate kinase comprising an amino acid sequence having at least 70%, 75%, 80%, 81%, 82%, 83%, 84%, 85%, 86%, 87%, 88%, 89%, 90%, 91%, 92%, 93%, 94%, 95%, 96%, 97%, 98%, 99%, or more sequence identity to the reference sequence corresponding to residues 12-417 of an even-numbered SEQ ID NO. of SEQ ID NOs: 982-1238, or to the reference sequence corresponding to an even-numbered SEQ ID NO. of SEQ ID NOs: 982-1238, wherein the amino acid sequence comprises one or more substitutions relative to the reference sequence corresponding to residues 12-417 of SEQ ID NO: 846, or relative to the reference sequence corresponding to SEQ ID NO: 846.

[0326] In some embodiments, the recombinant polynucleotide comprises a polynucleotide sequence encoding an engineered acetate kinase comprising an amino acid sequence comprising at least a substitution or substitution set at amino acid position(s) 19, 385, 231, 209, 31, 370, 183, 258, 14, 212, 355, 54, 240, 323, 356, 182, 263, 266, 119, 114, 118, 211, 358, 121, 277, 265, 306, 318, 28, 257, 269, 315, 38, 114/119/123, 205, 88, 152, 210, 384, 273, 180, 201, 402, 207, 127, 199, 128, 329, 91, 87, 264, 113/229, 30, 261, 398, 405, 363, 324, 204, 409, 213, 227, 361, 229, 383, 32/88, 149, 36, 88/387, 360, 150, 270, 49/54, 176, 406, 260, 167, 268, 364, 390, 117, 13, 116, or 279/293, wherein the amino acid positions are relative to the reference sequence corresponding to residues 12-417 of SEQ ID NO: 846, or relative to the reference sequence corresponding to SEQ ID NO: 846.

[0327] In some embodiments, the recombinant polynucleotide comprises a polynucleotide sequence encoding an engineered acetate kinase comprising an amino acid sequence having at least 70%, 75%, 80%, 81%, 82%, 83%, 84%, 85%, 86%, 87%, 88%, 89%, 90%, 91%, 92%, 93%, 94%, 95%, 96%, 97%, 98%, 99%, or more sequence identity to the reference sequence corresponding to residues 12-417 of SEQ ID NO: 1240, or to the reference sequence corresponding to SEQ ID NO: 1240, wherein the amino acid sequence comprises one or more substitutions relative to the reference sequence corresponding to residues 12-417 of SEQ ID NO: 1240, or relative to the reference sequence corresponding to SEQ ID NO: 1240.

[0328] In some embodiments, the recombinant polynucleotide comprises a polynucleotide sequence encoding an engineered acetate kinase comprising an amino acid sequence having at least 70%, 75%, 80%, 81%, 82%, 83%, 84%, 85%, 86%, 87%, 88%, 89%, 90%, 91%, 92%, 93%, 94%, 95%, 96%, 97%, 98%, 99%, or more sequence identity to the reference sequence corresponding to residues 12-417 of an even-numbered SEQ ID NO. of SEQ ID NOs: 1242-1346, or to the reference sequence corresponding to an even-numbered SEQ ID NO. of SEQ ID NOs: 1242-1346, wherein the amino acid sequence comprises one or more substitutions relative to the reference sequence corresponding to residues 12-417 of SEQ ID NO: 1240, or relative to the reference sequence corresponding to SEQ ID NO: 1240.

[0329] In some embodiments, the recombinant polynucleotide comprises a polynucleotide sequence encoding an engineered acetate kinase comprising an amino acid sequence comprising at least a substitution or substitution set at amino acid position(s) 19/22/285/300, 285/297/398, 127/183/297, 19/127/300, 32/54/88/209/277, 277/291, 127/183/300/398, 19/22/398, 32/54/209/277, 398, 16/28/54, 88/209/277, 127/297, 14/32/291, 19/127/183/297/300/398, 16/88, 54/277, 32, 16, 32/54/209, 22/183/297/398, 88, 14/209, 16/32/54/209/277, 19/127/292/300/398, 54/291, 54/88/277, 32/54/88/291, 209, 54/209, 209/291, 19/127, 291, 88/277, 32/209, 127/285, 32/88/209, 14/54/291, 14/88, 285/300, 127/285/297, 16/54/277, 88/209/223, 4, 32/88/277, 127/297/398, 32/209/291, 32/88, 22/38/127/300, 38/127/297, or 285/297, wherein the amino acid positions are relative to the reference sequence corresponding to residues 12-417 of SEQ ID NO: 1240, or relative to the reference sequence corresponding to SEQ ID NO: 1240.

[0330] In some embodiments, the recombinant polynucleotide comprises a polynucleotide sequence encoding an engineered acetate kinase comprising an amino acid sequence having at least 70%, 75%, 80%, 81%, 82%, 83%, 84%, 85%, 86%, 87%, 88%, 89%, 90%, 91%, 92%, 93%, 94%, 95%, 96%, 97%, 98%, 99%, or more sequence identity to the reference sequence corresponding to residues 12-417 of SEQ ID NO: 1250, or to the reference sequence corresponding to SEQ ID NO: 1250, wherein the amino acid sequence comprises one or more substitutions relative to the reference sequence corresponding to residues 12-417 of SEQ ID NO: 1250, or relative to the reference sequence corresponding to SEQ ID NO: 1250.

[0331] In some embodiments, the recombinant polynucleotide comprises a polynucleotide sequence encoding an engineered acetate kinase comprising an amino acid sequence having at least 70%, 75%, 80%, 81%, 82%, 83%, 84%, 85%, 86%, 87%, 88%, 89%, 90%, 91%, 92%, 93%, 94%, 95%, 96%, 97%, 98%, 99%, or more sequence identity to the reference sequence corresponding to residues 12-417 of an even-numbered SEQ ID NO. of SEQ ID NOs: 1348-1386, or to the reference sequence corresponding to an even-numbered SEQ ID NO. of SEQ ID NOs: 1348-1386, wherein the amino acid sequence comprises one or more substitutions relative to the reference sequence corresponding to residues 12-417 of SEQ ID NO: 1250, or relative to the reference sequence corresponding to SEQ ID NO: 1250.

[0332] In some embodiments, the recombinant polynucleotide comprises a polynucleotide sequence encoding an engineered acetate kinase comprising an amino acid sequence comprising at least a substitution at amino acid position 165, 345, 163, 320, 347, 316, 107, 348, 311, 339, 317, 22, 151, 138, 407, 223, 391, or 393, or combinations thereof, wherein the amino acid positions are relative to the reference sequence corresponding to residues 12-417 of SEQ ID NO: 1250, or relative to the reference sequence corresponding to SEQ ID NO: 1250.

[0333] In some embodiments, the recombinant polynucleotide comprises a polynucleotide sequence encoding an engineered acetate kinase comprising an amino acid sequence comprising at least a substitution at an amino acid position set forth in Tables 7.2, 8.2, 9.2, 10.2, 11.2, 12.2, 14.2, 15.2, 16.2, 17.2, 19.2, 22.2, 23.2, 24.2, 25.2, 26.2, 27.2, and 28.2, wherein the amino acid positions are relative to the reference sequence corresponding to amino acid residues 12-417 of SEQ ID NO: 4, 254, 396, 620, 846, 1240, or 1250, or relative to the reference sequence corresponding to SEQ ID NO: 4, 254, 396, 620, 846, 1240, or 1250.

[0334] In some embodiments, the recombinant polynucleotide comprises a polynucleotide sequence encoding an engineered acetate kinase comprising an amino acid sequence comprising at least one substitution set forth in Tables 7.2, 8.2, 9.2, 10.2, 11.2, 12.2, 14.2, 15.2, 16.2, 17.2, 19.2, 22.2, 23.2, 24.2, 25.2, 26.2, 27.2, and 28.2, wherein the amino acid positions are relative to the reference sequence corresponding to amino acid residues 12-417 of SEQ ID NO: 4, 254, 396, 620, 846, 1240, or 1250, or relative to the reference sequence corresponding to SEQ ID NO: 4, 254, 396, 620, 846, 1240, or 1250.

[0335] In some embodiments, the recombinant polynucleotide comprises a polynucleotide sequence encoding an engineered acetate kinase comprising an amino acid sequence comprising at least a substitution or substitution set at amino acid position(s) set forth in Tables 7.2, 8.2, 9.2, 10.2, 11.2, 12.2, 14.2, 15.2, 16.2, 17.2, 19.2, 22.2, 23.2, 24.2, 25.2, 26.2, 27.2, and 28.2, wherein the amino acid positions are relative to the reference sequence corresponding to amino acid residues 12-417 of SEQ ID NO: 4, 254, 396, 620, 846, 1240, or 1250, or relative to the reference sequence corresponding to SEQ ID NO: 4, 254, 396, 620, 846, 1240, or 1250.

[0336] In some embodiments, the recombinant polynucleotide comprises a polynucleotide sequence encoding an engineered acetate kinase comprising an amino acid sequence comprising at least a substitution or substitution set of an engineered acetate kinase variant set forth in Tables 7.2, 8.2, 9.2, 10.2, 11.2, 12.2, 14.2, 15.2, 16.2, 17.2, 19.2, 22.2, 23.2, 24.2, 25.2, 26.2, 27.2, and 28.2, wherein the amino acid positions are relative to the reference sequence corresponding to amino acid residues 12-417 of SEQ ID NO: 4, 254, 396, 620, 846, 1240, or 1250, or relative to the reference sequence corresponding to SEQ ID NO: 4, 254, 396, 620, 846, 1240, or 1250.

[0337] In some embodiments, the recombinant polynucleotide comprises a polynucleotide sequence encoding an engineered acetate kinase comprising an amino acid sequence having at least 70%, 75%, 80%, 81%, 82%, 83%, 84%, 85%, 86%, 87%, 88%, 89%, 90%, 91%, 92%, 93%, 94%, 95%, 96%, 97%, 98%, 99% or more sequence identity to a reference amino acid sequence comprising a substitution or substitution set of an engineered acetate kinase variant set forth in Tables 7.2, 8.2, 9.2, 10.2, 11.2, 12.2, 14.2, 15.2, 16.2, 17.2, 19.2, 22.2, 23.2, 24.2, 25.2, 26.2, 27.2, and 28.2, wherein the amino acid positions are relative to the reference sequence corresponding to amino acid residues 12-417 of SEQ ID NO: 4, 254, 396, 620, 846, 1240, or 1250, or relative to the reference sequence corresponding to SEQ ID NO: 4, 254, 396, 620, 846, 1240, or 1250.

[0338] In some embodiments, the recombinant polynucleotide comprises a polynucleotide sequence encoding an engineered acetate kinase comprising amino acid residues 12-417 of an even-numbered SEQ ID NO. of SEQ ID NOs: 14-566, 612-868, 894-924, and 940-1390, or comprises an even-numbered SEQ ID NO. of SEQ ID NOs: 14-566, 612-868, 894-924, and 940-1390, optionally wherein the engineered acetate kinase has 1, 2, 3, 4, 5, 6, 7, 8, 9, or up to 10 substitutions in the amino acid sequence.

[0339] In some embodiments, the recombinant polynucleotide comprising a polynucleotide sequence having at least 70%, 75%, 80%, 81%, 82%, 83%, 84%, 85%, 86%, 87%, 88%, 89%, 90%, 91%, 92%, 93%, 94%, 95%, 96%, 97%, 98%, 99%, or more sequence identity to a reference polynucleotide sequence corresponding to nucleotide residues 34-1251 of SEQ ID NO: 3, 253, 395, 619, 845, 1239, or 1249, or to a reference polynucleotide sequence corresponding to SEQ ID NO: 3, 253, 395, 619, 845, 1239, or 1249, wherein the recombinant polynucleotide encodes an acetate kinase.

[0340] In some embodiments, the recombinant polynucleotide comprises a polynucleotide sequence having at least 70%, 75%, 80%, 81%, 82%, 83%, 84%, 85%, 86%, 87%, 88%, 89%, 90%, 91%, 92%, 93%, 94%, 95%, 96%, 97%, 98%, 99%, or more sequence identity to a reference polynucleotide sequence corresponding to nucleotide residues 34-1251 of an odd-numbered SEQ ID NO. of SEQ ID NOs: 13-565, 611-867, 893-923, and 939-1389, or to a reference polynucleotide sequence corresponding to an odd-numbered SEQ ID NO. of SEQ ID NOs: 13-565, 611-867, 893-923, and 939-1389, wherein the recombinant polynucleotide encodes an engineered acetate kinase.

[0341] In some embodiments, the recombinant polynucleotide comprises nucleotide residues 34-1251 of an odd-numbered SEQ ID NO. of SEQ ID NOs: 13-565, 611-867, 893-923, and 939-1389, or comprises an odd-numbered SEQ ID NO. of SEQ ID NOs: 13-565, 611-867, 893-923, and 939-1389.

[0342] In some embodiments, the present disclosure provides a recombinant polynucleotide capable of hybridizing under highly stringent conditions to a reference polynucleotide encoding an engineered acetate kinase polypeptide described herein, e.g., a recombinant polynucleotide provided in Tables 7.2, 8.2, 9.2, 10.2, 11.2, 12.2, 14.2, 15.2, 16.2, 17.2, 19.2, 22.2, 23.2, 24.2, 25.2, 26.2, 27.2, or 28.2, or a reverse complement thereof. In some embodiments, the recombinant polynucleotide hybridizes under highly stringent conditions to a reference polynucleotide corresponding to nucleotide residues 34-1251 of SEQ ID NO: 3, 253, 395, 619, 845, 1239, or 1249, or to a reference polynucleotide sequence corresponding to SEQ ID NO: 3, 253, 395, 619, 845, 1239, or 1249, or a reverse complement thereof. In some embodiments, the recombinant polynucleotide hybridizes under highly stringent conditions to a reference polynucleotide corresponding to nucleotide residues 34-1251 of an odd-numbered SEQ ID NO. of SEQ ID NOs: 13-565, 611-867, 893-923, and 939-1389, or corresponding to an odd-numbered SEQ ID NO. of SEQ ID NOs: 13-565, 611-867, 893-923, and 939-1389, or a reverse complement thereof.

[0343] In some embodiments, the present disclosure provides a recombinant polynucleotide capable of hybridizing under highly stringent conditions to a reverse complement of a reference polynucleotide encoding an engineered adenylate kinase polypeptide described herein, wherein the recombinant polynucleotide hybridizing under stringent conditions encodes an adenylate kinase polypeptide comprising an amino acid sequence having one or more amino acid differences as compared to SEQ ID NO: 4, 254, 396, or 620, at residue positions selected from any positions as set forth in Tables 7.2, 8.2, 9.2, 10.2, 11.2, 12.2, 14.2, 15.2, 16.2, 17.2, 19.2, 22.2, 23.2, 24.2, 25.2, 26.2, 27.2, and 28.2. In some embodiments, the recombinant polynucleotide that hybridizes under highly stringent conditions to a reverse complement of a reference polynucleotide encoding an engineered adenylate kinase polypeptide described herein, encodes an adenylate kinase polypeptide having one or more amino acid differences present in an engineered adenylate kinase having an amino acid sequence corresponding to residues 12-417 of an even-numbered SEQ ID NO. of SEQ ID NOs: 4, 14-566, 612-868, 894-924, and 940-1390, or an amino acid sequence corresponding to an even-numbered SEQ ID NO. of SEQ ID NOs: 4, 14-566, 612-868, 894-924, and 940-1390, wherein the amino acid differences are relative to SEQ ID NO: 4, 254, 396, 620, 846, 1240, or 1250.

[0344] In some embodiments, the recombinant polynucleotide that hybridizes under highly stringent conditions comprises a polynucleotide sequence having at least 70%, 75%, 80%, 81%, 82%, 83%, 84%, 85%, 86%, 87%, 88%, 89%, 90%, 91%, 92%, 93%, 94%, 95%, 96%, 97%, 98%, 99% or more sequence identity to a reference polynucleotide sequence corresponding to nucleotide residues 34-1251 of SEQ ID NO: 3, 253, 395, 619, 845, 1239, or 1249, or to a reference polynucleotide sequence corresponding to SEQ ID NO: 3, 253, 395, 619, 845, 1239, or 1249, or a reverse complement thereof. In some embodiments, the recombinant polynucleotide that hybridizes under highly stringent conditions comprises a polynucleotide sequence having at least 70%, 75%, 80%, 81%, 82%, 83%, 84%, 85%, 86%, 87%, 88%, 89%, 90%, 91%, 92%, 93%, 94%, 95%, 96%, 97%, 98%, 99% or more sequence identity to a reference polynucleotide sequence corresponding to nucleotide residues 34-1251 of an odd-numbered SEQ ID NO. of SEQ ID NOs: 13-565, 611-867, 893-923, and 939-1389, or an odd-numbered SEQ ID NO. of SEQ ID NOs: 13-565, 611-867, 893-923, and 939-1389, or a reverse complement thereof.

[0345] In some additional embodiments, the polynucleotide hybridizing under highly stringent conditions comprises a polynucleotide sequence having at least 75%, 80%, 81%, 82%, 83%, 84%, 85%, 86%, 87%, 88%, 89%, 90%, 91%, 92%, 93%, 94%, 95%, 96%, 97%, 98%, 99% or more sequence identity to a reverse complement of a polynucleotide reference sequence corresponding to nucleotide residues 34-1251 of SEQ ID NO: 3, 253, 395, 619, 845, 1239, or 1249, or to a reference polynucleotide sequence corresponding to SEQ ID NO: 3, 253, 395, 619, 845, 1239, or 1249 encodes an engineered adenylate kinase polypeptide. In some additional embodiments, the polynucleotide hybridizing under highly stringent conditions comprises a polynucleotide sequence having at least 75%, 80%, 81%, 82%, 83%, 84%, 85%, 86%, 87%, 88%, 89%, 90%, 91%, 92%, 93%, 94%, 95%, 96%, 97%, 98%, 99% or more sequence identity to a reverse complement of a polynucleotide reference sequence corresponding to nucleotide residues 34-1251 of an odd-numbered SEQ ID NO. of SEQ ID NOs: 13-565, 611-867, 893-923, and 939-1389, or an odd-numbered SEQ ID NO. of SEQ ID NOs: 13-565, 611-867, 893-923, and 939-1389 encodes an engineered adenylate kinase polypeptide.

[0346] In some embodiments, the recombinant polynucleotide comprises a polynucleotide sequence encoding an acetate kinase comprising an amino acid sequence comprising
[0347] (a) residues 12 to 418 of SEQ ID NO: 2;
   [0348] residues 12 to 417 of SEQ ID NO: 4;
   [0349] residues 12 to 414 of SEQ ID NO: 6;
   [0350] residues 12 to 417 of SEQ ID NO: 8;
   [0351] residues 12 to 415 of SEQ ID NO: 10;
   [0352] residues 12 to 417 of SEQ ID NO: 12; or
[0353] (b) SEQ ID NO: 2;
   [0354] SEQ ID NO: 4;
   [0355] SEQ ID NO: 6;
   [0356] SEQ ID NO: 8;
   [0357] SEQ ID NO: 10; or
   [0358] SEQ ID NO: 12.

[0359] In some embodiments, the recombinant polynucleotide comprises a polynucleotide sequence comprising
[0360] (a) nucleotide residues 34 to 1254 of SEQ ID NO: 1;
   [0361] nucleotide residues 34 to 1251 of SEQ ID NO: 3;
   [0362] nucleotide residues 34 to 1242 of SEQ ID NO: 5;
   [0363] nucleotide residues 34 to 1251 of SEQ ID NO: 7;
   [0364] nucleotide residues 34 to 1245 of SEQ ID NO: 9; or
   [0365] nucleotide residues 34 to 1251 of SEQ ID NO: 11; or
[0366] (b) SEQ ID NO: 3;
   [0367] SEQ ID NO: 5;
   [0368] SEQ ID NO: 7;
   [0369] SEQ ID NO: 9; or
   [0370] SEQ ID NO: 11.

[0371] In some embodiments, a recombinant polynucleotide encoding any of the acetate kinase provided herein is manipulated in a variety of ways to provide for expression of the polypeptide. In some embodiments, the recombinant polynucleotide encoding the polypeptides are provided as expression vectors where one or more control sequences is operably linked to the recombinant polynucleotide to regulate the expression of the polynucleotide and/or encoded polypeptide. The techniques for modifying polynucleotides and nucleic acid sequences utilizing recombinant DNA methods are known in the art.

[0372] In some embodiments, the control sequences include, among others, promoter sequences, Kozak sequence, leader sequences, polyadenylation sequences, pro-peptide sequences, signal peptide sequences, regulatory elements, and transcription terminators. As known in the art, suitable promoters can be selected based on the host cells used. For bacterial host cells, suitable promoters for directing transcription of the nucleic acid constructs of the present disclosure, include, but are not limited to promoters obtained from the E. coli lac operon, Streptomyces coelicolor agarase gene (dagA), Bacillus subtilis levansucrase gene (sacB), Bacillus licheniformis alpha-amylase gene (amyL), Bacillus stearothermophilus maltogenic amylase gene (amyM), Bacillus amyloliquefaciens alpha-amylase gene (amyQ), Bacillus licheniformis penicillinase gene (penP), Bacillus subtilis xylA and xylB genes, and prokaryotic beta-lactamase gene (see e.g., Villa-Kamaroff et al., Proc. Natl Acad. Sci. USA, 1978, 75:3727-3731), as well as the tac promoter (see, e.g., DeBoer et al., Proc. Natl Acad. Sci. USA, 1983, 80:21-25). Exemplary promoters for filamentous fungal host cells, include, but are not limited to promoters obtained from the genes for Aspergillus oryzae TAKA amylase, Rhizomucor miehei aspartic proteinase, Aspergillus niger neutral alpha-amylase, Aspergillus niger acid stable alpha-amylase, Aspergillus niger or Aspergillus awamori glucoamylase (glaA), Rhizomucor miehei lipase, Aspergillus oryzae alkaline protease, Aspergillus oryzae triose phosphate isomerase, Aspergillus nidulans acetamidase, and Fusarium oxysporum trypsin-like protease (see e.g., WO 96/00787), as well as the NA2-tpi promoter (a hybrid of the promoters from the genes for Aspergillus niger neutral alpha-amylase and Aspergillus oryzae triose phosphate isomerase), and mutant, truncated, and hybrid promoters thereof. Exemplary yeast cell promoters can be from the genes can be from the genes for Saccharomyces cerevisiae enolase (ENO-1), Saccharomyces cerevisiae galactokinase (GAL1), Saccharomyces cerevisiae alcohol dehydrogenase/glyceraldehyde-3-phosphate dehydrogenase (ADH2/GAP), and Saccharomyces cerevisiae 3-phosphoglycerate kinase. Other useful promoters for yeast host cells are known in the art (see e.g., Romanos et al., Yeast, 1992, 8:423-488). In some embodiments, for insect host cells, suitable promoters include, among others, baculovirus promoters (e.g., P10 and polyhedron promoters), OpIE2 promoter, and Nephotettix cincticeps actin promoters. In some embodiments, promoters effective in Pichia cells are used. In some embodiments, for insect host cells, suitable promoters include, among others, baculovirus promoters (e.g., P10 and polyhedron promoters), OpIE2 promoter, and Nephotettix cincticeps actin promoters. In some embodiments, for mammalian host cells, suitable promoters include, among others, promoters of cytomegalovirus (CMV), chicken β-actin promoter fused with the CMV enhancer, simian virus 40 (SV40), human phosphoglycerate kinase, beta actin, elongation factor-1a or glyceraldehyde-3-phosphate dehydrogenase, or Gallus β-actin.

[0373] In some embodiments, the control sequence is also a suitable transcription terminator sequence (i.e., a sequence recognized by a host cell to terminate transcription). In some embodiments, the terminator sequence is operably linked to the 3′ terminus of the nucleic acid sequence encoding the leucine decarboxylase polypeptide. Any suitable terminator which is functional in the host cell of choice finds use in the present invention. For bacterial expression, the transcription terminators can be a Rho-dependent terminators that rely on a Rho transcription factor, or a Rho-independent, or intrinsic terminators, which do not require a transcription factor. Exemplary bacterial transcription terminators are described in Peters et al., J Mol Biol., 2011, 412 (5): 793-813. Exemplary transcription terminators for filamentous fungal host cells can be obtained from the genes for Aspergillus oryzae TAKA amylase, Aspergillus niger glucoamylase, Aspergillus nidulans anthranilate synthase, Aspergillus niger alpha-glucosidase, and Fusarium oxysporum trypsin-like protease. Exemplary terminators for yeast host cells can be obtained from the genes for Saccharomyces cerevisiae enolase, Saccharomyces cerevisiae cytochrome C (CYC1), and Saccharomyces cerevisiae glyceraldehyde-3-phosphate dehydrogenase. Other useful terminators for yeast host cells are known in the art (see, e.g., Romanos et al., supra). Exemplary terminators for mammalian cells include, but are not limited to those from cytomegalovirus (CMV), Simian virus 40 (SV40), from Homo sapiens growth hormone hGH, from bovine growth hormone BGH, and from human or rabbit beta globulin.

[0374] In some embodiments, the control sequence is also a suitable leader sequence (i.e., a non-translated region of an mRNA that regulates translation by the host cell). In some embodiments, the leader sequence is operably linked to the 5′ terminus of the nucleic acid sequence encoding the acetate kinase polypeptide. Any suitable leader sequence that is functional in the host cell of choice find use in the present invention. Exemplary leaders for filamentous fungal host cells are obtained from the genes for Aspergillus oryzae TAKA amylase, and Aspergillus nidulans triose phosphate isomerase. Suitable leaders for yeast host cells are obtained from the genes for Saccharomyces cerevisiae enolase (ENO-1), Saccharomyces cerevisiae 3-phosphoglycerate kinase, Saccharomyces cerevisiae alpha-factor, and Saccharomyces cerevisiae alcohol dehydrogenase/glyceraldehyde-3-phosphate dehydrogenase (ADH2/GAP). Suitable leaders for mammalian host cells include but are not limited to the 5′-UTR element present in orthopoxvirus mRNA.

[0375] In some embodiments, the control sequence comprises a 3′ untranslated nucleic acid region and polyadenylation tail nucleic acid sequence, sequences operably linked to the 3′ terminus of the protein coding nucleic acid sequence which mediate binding to proteins involved in mRNA trafficking and translation and mRNA half-life. Any polyadenylation sequence and 3′ UTR which is functional in the host cell of choice may be used in the present invention. Exemplary polyadenylation sequences for filamentous fungal host cells include, but are not limited to those from the genes for Aspergillus oryzae TAKA amylase, Aspergillus niger glucoamylase, Aspergillus nidulans anthranilate synthase, Fusarium oxysporum trypsin-like protease, and Aspergillus niger alpha-glucosidase. Useful polyadenylation sequences for yeast host cells are also known in the art (See e.g., Guo and Sherman, Mol. Cell. Biol., 1995, 15:5983-5990). Useful polyadenylation and 3′ UTR sequences for mammalian host cells include, but are not limited to, the 3′-UTRs of α- and β-globin mRNAs that harbor several sequence elements that increase the stability and translation of mRNA.

[0376] In some embodiments, the control sequence is a signal peptide (i.e., a coding region that codes for an amino acid sequence linked to the amino terminus of a polypeptide and directs the encoded polypeptide into the cell's secretory pathway). In some embodiments, the 5′ end of the coding sequence of the nucleic acid sequence inherently contains a signal peptide coding region naturally linked in translation reading frame with the segment of the coding region that encodes the secreted polypeptide. Alternatively, in some embodiments, the 5′ end of the coding sequence contains a signal peptide coding region that is foreign to the coding sequence. Any suitable signal peptide coding region which directs the expressed polypeptide into the secretory pathway of a host cell of choice finds use for expression of the engineered polypeptide(s). Effective signal peptide coding regions for bacterial host cells are the signal peptide coding regions include, but are not limited to those obtained from the genes for Bacillus NCIB 11837 maltogenic amylase, Bacillus stearothermophilus alpha-amylase, Bacillus licheniformis subtilisin, Bacillus licheniformis beta-lactamase, Bacillus stearothermophilus neutral proteases (nprT, nprS, nprM), and Bacillus subtilis prsA. Further signal peptides are known in the art (See e.g., Simonen and Palva, Microbiol. Rev., 1993, 57:109-137). In some embodiments, effective signal peptide coding regions for filamentous fungal host cells include, but are not limited to the signal peptide coding regions obtained from the genes for Aspergillus oryzae TAKA amylase, Aspergillus niger neutral amylase, Aspergillus niger glucoamylase, Rhizomucor miehei aspartic proteinase, Humicola insolens cellulase, and Humicola lanuginosa lipase. Useful signal peptides for yeast host cells include, but are not limited to those from the genes for Saccharomyces cerevisiae alpha-factor and Saccharomyces cerevisiae invertase. Useful signal peptides for mammalian host cells include but are not limited to, those from the genes for immunoglobulin gamma (IgG) and the signal peptide in a human secreted protein, such as human beta-galactosidase polypeptide.

[0377] In some embodiments, the control sequence is a regulatory sequence that facilitates the regulation of the expression of the recombinant polynucleotide and/or encoded polypeptide. Examples of regulatory systems are those that cause the expression of the gene to be turned on or off in response to a chemical or physical stimulus, including the presence of a regulatory compound. In prokaryotic host cells, suitable regulatory sequences include, but are not limited to the lac, tac, and trp operator systems. In yeast host cells, suitable regulatory systems include, but are not limited to the ADH2 system or GAL1 system. In filamentous fungi, suitable regulatory sequences include, but are not limited to the TAKA alpha-amylase promoter, Aspergillus niger glucoamylase promoter, and Aspergillus oryzae glucoamylase promoter. In mammalian cells, suitable regulatory systems include, among others, zinc-inducible sheep metallothionine (MT) promoter, dexamethasone (Dex)-inducible promoter, mouse mammary tumor virus (MMTV) promoter; ecdysone insect promoter, tetracycline-inducible promoter system, RU486-inducible promoter system, and the rapamycin-inducible promoter system.

[0378] In another aspect, the present disclosure provides an expression vector comprising a recombinant polynucleotide encoding an acetate kinase polypeptide, where the recombinant polynucleotide is operably or operatively linked to a control sequence, such as a promoter and a terminator, a replication origin, etc., depending on the type of hosts into which they are to be introduced. The recombinant expression vector may be any suitable vector (e.g., a plasmid or virus), that can be conveniently subjected to recombinant DNA procedures and bring about the expression of the acetate kinase polynucleotide sequence. The choice of the vector typically depends on the compatibility of the vector with the host cell into which the vector is to be introduced. The vectors may be linear or closed circular plasmids.

[0379] In some embodiments, the expression vector is an autonomously replicating vector (i.e., a vector that exists as an extra-chromosomal entity, the replication of which is independent of chromosomal replication, such as a plasmid, an extra-chromosomal element, a minichromosome, or an artificial chromosome). The vector may contain any means for assuring self-replication. In some alternative embodiments, the vector may be one which, when introduced into the host cell, is integrated into the genome and replicated together with the chromosome(s) into which it has been integrated. Furthermore, a single vector or plasmid or two or more vectors or plasmids which together contain the total DNA to be introduced into the genome of the host cell, or a transposon may be used.

[0380] In some embodiment, recombinant polynucleotides may be provided on a non-replicating expression vector or plasmid. In some embodiments, the non-replicating expression vector or plasmid can be based on viral vectors defective in replication (see, e.g., Travieso et al., npj Vaccines, 2022, Vol. 7, Article 75).

[0381] In some embodiments, the expression vector contains one or more selectable markers, which permit easy selection of transformed cells. A “selectable marker” is a gene, the product of which provides for biocide or viral resistance, resistance to heavy metals, prototrophy to auxotrophs, and the like. Examples of bacterial selectable markers include, but are not limited to the dal genes from Bacillus subtilis or Bacillus licheniformis, or markers, which confer antibiotic resistance such as ampicillin, kanamycin, chloramphenicol or tetracycline resistance. Suitable markers for yeast host cells include, but are not limited to ADE2, HIS3, LEU2, LYS2, MET3, TRP1, and URA3. Selectable markers for use in filamentous fungal host cells include, but are not limited to, amdS (acetamidase; e.g., from A. nidulans or A. orzyae), argB (ornithine carbamoyltransferases), bar (phosphinothricin acetyltransferase; e.g., from S. hygroscopicus), hph (hygromycin phosphotransferase), niaD (nitrate reductase), pyrG (orotidine-5′-phosphate decarboxylase; e.g., from A. nidulans or A. orzyae), sC (sulfate adenyltransferase), and trpC (anthranilate synthase), as well as equivalents thereof. Selectable marker for mammalian cells include, among others, chloramphenicol acetyl transferase (CAT), nourseothricin N-acetyl transferase, blasticidin-S deaminase, blastcidin S acetyltransferase, Sh ble (Zeocin® resistance), aminoglycoside 3′-phosphotransferase (neomycin resistance), hph (hygromycin resistance), thymidine kinase, and puromycin N-acetyl-transferase.

[0382] In another aspect, the present disclosure provides a host cell comprising at least one recombinant polynucleotide encoding an acetate kinase polypeptide of the present disclosure, the recombinant polynucleotide(s) being operatively linked to one or more control sequences for expression of the acetate kinase polypeptide. In some embodiments, the host cells suitable for use in expressing the polypeptides encoded by the expression vectors is a prokaryotic cell or eukaryotic cell known in the art. In some embodiments, the host cell is a bacterial cell, including, among others, E. coli, B. subtilis, Vibrio fluvialis, Streptomyces and Salmonella typhimurium cell. Exemplary bacterial host cells also include various Escherichia coli strains (e.g., W3110 (AfhuA) and BL21). In some embodiments, the host cell is a fungal cell, such as filamentous fungal cell or yeast cell. In some embodiments, suitable fungal host cells include, among others, Pichia, Saccharomyces, Yarrowia, Kluyveromyces, Aspergillus, Trichoderma, Neurospora, Mucor, Penicillium T. Trichoderma, or Myceliophthora fungal cell. Exemplary fungal host cell includes, among others, Pichia pastoris, Yarrowia lipolytica, Kluyveromyces marxianus, Kluyveromyces lactis, Aspergillus niger, Aspergillus oryzae, Aspergillus fumigatus Trichoderma reesei. Neurospora crassa, Mucor circinelloides, Penicillium chrysogenum T. reesei, Trichoderma harzianum, Saccharomyces cerevisiae, or Myceliophthora thermophile. In some embodiments, the host cell is an insect cell. In some embodiments, a suitable insect host cell is a lepidopteran or dipteran insect cell. Exemplary insect host cell includes, among others, Sf9 cell, Sf21 cell, Schneider 2 cell, and BTI-TN-5B1-4 (High Five) cell. In some embodiments, the host cell is a mammalian cell. In some embodiments, the host cell is a human cell or rodent cell. Exemplary mammalian cells include, among others, Expi293, HeLa, U2OS, A549, HT1080, CAD, P19, NIH 3T3, L929, Hek 293, 293F, 293E, 293T, COS, Vero, NS0, Sp2/0 cell, DUKX-X11, MCF-7, Y79, SO—Rb50, Hep G2, J558L, and CHO cell.

[0383] In another aspect, the present disclosure provides a method of producing the acetate kinase polypeptides, where the method comprises culturing a host cell comprising an expression vector capable of expressing or producing the acetate kinase polypeptide under suitable culture conditions such that the acetate kinase polypeptide is expressed or produced. In some embodiments, the method comprises isolating the acetate kinase from the culture medium and/or host cell, as described herein. In some further embodiments, the method further comprises purifying the expressed acetate kinase polypeptide.

[0384] In some embodiments, the acetate kinase polypeptide expressed in a host cell is recovered from the cells and/or the culture medium using any one or more of the well-known techniques for protein purification, including, among others, lysozyme or detergent treatment, sonication, filtration, salting-out, ultra-centrifugation, and chromatography, such as described herein.

[0385] Chromatographic techniques for isolation/purification of the acetate kinase polypeptides include, among others, reverse phase chromatography, high-performance liquid chromatography, ion-exchange chromatography, hydrophobic-interaction chromatography, size-exclusion chromatography, gel electrophoresis, and affinity chromatography. Conditions for purifying the acetate kinase depends, in part, on factors such as net charge, hydrophobicity, hydrophilicity, molecular weight, molecular shape, etc., and will be apparent to those having skill in the art. In some embodiments, affinity techniques may be used to isolate the acetate kinase. For affinity chromatography purification, an antibody that specifically binds acetate kinase polypeptide may be used. In some embodiments, an affinity tag, e.g., His-tag, can be introduced into the acetate kinase polypeptide for purposes of isolation/purification.

[0386] Appropriate culture media and growth conditions for the above-described host cells are well known in the art. Polynucleotides for expression of the acetate kinases may be introduced into cells by various methods known in the art. Techniques include, among others, electroporation, biolistic particle bombardment, liposome mediated transfection, calcium chloride transfection, and protoplast fusion.

[0387] In some embodiments, the polynucleotides encoding the acetate kinase polypeptide can be prepared by standard solid-phase methods, according to known synthetic methods. In some embodiments, polynucleotide fragments can be individually synthesized, then joined (e.g., by enzymatic or chemical litigation methods, or polymerase mediated methods) to form any desired continuous sequence. For example, polynucleotides and oligonucleotides disclosed herein can be prepared by chemical synthesis using the classical phosphoramidite method (See e.g., Beaucage et al., Tetra. Lett., 1981, 22:1859-69; and Matthes et al., EMBO J., 1984, 3:801-05), as it is typically practiced in automated synthetic methods.

[0388] In some embodiments, a method for preparing the acetate kinase can comprise: (a) synthesizing a polynucleotide encoding a polypeptide comprising an amino acid sequence selected from the amino acid sequence of an acetate kinase, such as described in Tables of the Examples, and (b) expressing the engineered acetate kinase encoded by the polynucleotide. In some embodiments of the method, the amino acid sequence encoded by the polynucleotide can optionally have one or several (e.g., up to 3, 4, 5, or up to 10) amino acid residue deletions, insertions and/or substitutions. In some embodiments, the amino acid sequence has optionally 1-2, 1-3, 1-4, 1-5, 1-6, 1-7, 1-8, 1-9, 1-10, 1-15, 1-20, 1-21, 1-22, 1-23, 1-24, 1-25, 1-30, 1-35, 1-40, 1-45, or 1-50 amino acid residue deletions, insertions and/or substitutions. In some embodiments, the amino acid sequence has optionally 1, 2, 3, 4, 5, 6, 7, 8, 9, 10, 11, 12, 13, 14, 15, 16, 17, 18, 19, 20, 21, 22, 23, 24, 25, 30, 30, 35, 40, 45, or 50 amino acid residue deletions, insertions and/or substitutions. In some embodiments, the amino acid sequence has optionally 1, 2, 3, 4, 5, 6, 7, 8, 9, 10, 11, 12, 13, 14, 15, 16, 18, 20, 21, 22, 23, 24, or 25 amino acid residue deletions, insertions and/or substitutions. In some embodiments, the substitutions can be conservative or non-conservative substitutions. The expressed polypeptide can be assessed for the desired property, e.g., acetate kinase activity on one or more NDPs.

### Compositions

[0389] In a further aspect, the present disclosure provides compositions of the engineered acetate kinases disclosed herein. In some embodiments, the engineered acetate kinase polypeptide in the composition is isolated or purified. In some embodiments, the acetate kinase is combined with other components and compounds to provide compositions and formulations comprising the engineered acetate kinase polypeptide as appropriate for different applications and uses.

[0390] In some embodiments, the composition comprises at least one acetate kinase described herein. For example, a composition comprises at least one engineered acetate kinase exemplified in Tables 7.2, 8.2, 9.2, 10.2, 11.2, 12.2, 14.2, 15.2, 16.2, 17.2, 19.2, 22.2, 23.2, 24.2, 25.2, 26.2, 27.2, and 28.2, and the Sequence Listing. In some embodiments, the composition comprising an engineered acetate kinase is an aqueous solution. In some embodiments, the composition comprising an engineered acetate kinase is a lyophilizate.

[0391] In some embodiments, the composition further comprises at least a buffer, including the suitable buffers described herein, e.g., MOPS, triethanolamine, etc. In some embodiments, the compositions comprises further comprises an additional enzyme, including, among others, one or more of an adenosine kinase, adenylate kinase, 3′-O-kinase, and pyruvate oxidase.

[0392] In some embodiments, the composition further comprises an NDP substrate. In some embodiments, the NDP substrate is a modified NDP, such as on the 2′-position of the sugar moiety (e.g., 2′-halo, 2′-O-METHYL) or the phosphate (e.g., NDPαS), as further described below and herein.

[0393] In some embodiments, the NDP substrate is an unmodified NDP. In some embodiments, the NDP substrate is ADP, GDP, CDP, UDP, or TDP. In some embodiments, the NDP substrate concentration is about 0.1 mM to 200 mM, 0.5 mM to 180 mM, 1 mM to 150 mM, 2 mM to 120 mM, 5 mM to 100 mM, 10 mM to 80 mM, or 20 mM to 60 mM, as further described herein. In some embodiments, the NDP substrate concentration is about 100 mM-200 mM. In some embodiments, the NDP substrate concentration is about 0.1 mM, 0.5 mM, 1 mM, 2 mM, 5 mM, 10 mM, 20 mM, 60 mM, 80 mM, 100 mM, 120 mM, 150 mM, 180 mM, or 200 mM.

[0394] In some embodiments, the concentration of ADP in the composition is about 0.1 mM to 200 mM, 0.5 mM to 180 mM, 1 mM to 150 mM, 2 mM to 120 mM, 5 mM to 100 mM, 10 mM to 80 mM, or 20 mM to 60 mM. In some embodiments, the ADP substrate concentration is about 100 mM-200 mM. In some embodiments, the concentration of ADP in the composition is at least 0.1 mM, 0.5 mM, 1 mM, 2 mM, 3 mM, 4 mM, 5 mM, 7 mM, 10 mM, 20 mM, 60 mM, 80 mM, 100 mM, 120 mM, 150 mM, 180 mM, or 200 mM, or greater.

[0395] In some embodiments, the concentration of GDP in the composition is about 0.1 mM to 200 mM, 0.5 mM to 180 mM, 1 mM to 150 mM, 2 mM to 120 mM, 5 mM to 100 mM, 10 mM to 80 mM, or 20 mM to 60 mM. In some embodiments, the GDP substrate concentration is about 100 mM-200 mM. In some embodiments, the concentration of GDP in the composition is at least 0.1 mM, 0.5 mM, 1 mM, 2 mM, 3 mM, 4 mM, 5 mM, 7 mM, 10 mM, 20 mM, 60 mM, 80 mM, 100 mM, 120 mM, 150 mM, 180 mM, or 200 mM, or greater.

[0396] In some embodiments, the concentration of CDP in the composition is about 0.1 mM to 200 mM, 0.5 mM to 180 mM, 1 mM to 150 mM, 2 mM to 120 mM, 5 mM to 100 mM, 10 mM to 80 mM, or 20 mM to 60 mM. In some embodiments, the CDP substrate concentration is about 100 mM-200 mM. In some embodiments, the concentration of CDP in the composition is at least 0.1 mM, 0.5 mM, 1 mM, 2 mM, 3 mM, 4 mM, 5 mM, 7 mM, 10 mM, 20 mM, 60 mM, 80 mM, 100 mM, 120 mM, 150 mM, 180 mM, or 200 mM, or greater.

[0397] In some embodiments, the concentration of UDP in the composition is about 0.1 mM to 200 mM, 0.5 mM to 180 mM, 1 mM to 150 mM, 2 mM to 120 mM, 5 mM to 100 mM, 10 mM to 80 mM, or 20 mM to 60 mM. In some embodiments, the UDP substrate concentration is about 100 mM-200 mM. In some embodiments, the concentration of UDP in the composition is at least 0.1 mM, 0.5 mM, 1 mM, 2 mM, 3 mM, 4 mM, 5 mM, 7 mM, 10 mM, 20 mM, 60 mM, 80 mM, 100 mM, 120 mM, 150 mM, 180 mM, or 200 mM, or greater.

[0398] In some embodiments, the concentration of TDP in the composition is about 0.1 mM to 200 mM, 0.5 mM to 180 mM, 1 mM to 150 mM, 2 mM to 120 mM, 5 mM to 100 mM, 10 mM to 80 mM, or 20 mM to 60 mM. In some embodiments, the TDP substrate concentration is about 100 mM-200 mM. In some embodiments, the concentration of TDP in the composition is at least 0.1 mM, 0.5 mM, 1 mM, 2 mM, 3 mM, 4 mM, 5 mM, 7 mM, 10 mM, 20 mM, 60 mM, 80 mM, 100 mM, 120 mM, 150 mM, 180 mM, or 200 mM, or greater.

[0399] In some embodiments, the NDP substrate is a modified NDP. In some embodiments, the modified NDP substrate is modified on the 2′- and/or 3′-position of the sugar moiety (e.g., 2′-halo, 2′-O-methyl, 3′-O-phosphate, etc.), the nucleobase, the phosphate group (e.g., NMPαS), or any combinations thereof. In some embodiments, the concentration of modified NDP is similar to the concentration of the unmodified NDP. In some embodiments, the modified NDP substrate concentration is about 0.1 mM to 200 mM, 0.5 mM to 180 mM, 1 mM to 150 mM, 2 mM to 120 mM, 5 mM to 100 mM, 10 mM to 80 mM, or 20 mM to 60 mM, as further described herein. In some embodiments, the modified NDP substrate concentration is about 100 mM-200 mM. In some embodiments, the modified NDP substrate concentration is about 0.1 mM, 0.5 mM, 1 mM, 2 mM, 5 mM, 10 mM, 20 mM, 60 mM, 80 mM, 100 mM, 120 mM, 150 mM, 180 mM, or 200 mM.

[0400] In some embodiments, the modified NDP substrate comprises a 2′-fluoro modified NDP. In some embodiments, the 2′-fluoro modified nucleoside is 2′-fluoro-ADP, 2′-fluoro-GDP, 2′-fluoro-CDP, 2′-fluoro-2′-UDP, and/or 2-fluoro-TDP. In some embodiments, the modified nucleoside comprises a 2′-O-methyl modified NDP. In some embodiments, the 2′-O-methyl modified nucleoside is 2′-O-methyl ADP, 2′-O-methyl GDP, 2′-O-methyl CDP, 2′-O-methyl UDP, and/or 2′-O-methyl TDP. Other 2′-modifications are described herein.

[0401] In some embodiments, the modified NDP substrate comprises a modified 3′-position of the sugar moiety. In some embodiments, the 3′-position of the sugar moiety is modified with a blocking group, preferably a reversible blocking group. In some embodiments, the blocking group is a formate, benzoylformate, acetate, propionate, isobutyrate, aminoxy (—ONH₂), O-methyl, O-methoxymethyl, O-methylthiomethyl, O-benzyloxymethyl, O-allyl, O-(2-nitrobenzyl), O-azidomethyl (O—CH₂N₃), O-tert-butyldithiomethyl, phosphate, diphosphate, or triphosphate. Reversible 3′-blocked nucleoside/nucleotides are described in Chen et al., Genomics, Proteomics & Bioinformatics, 2013, 11 (1): 34-40, Metzker et al., Nucleic Acids Res., 1994, 22 (20): 4259-4267; Sabat et al., Front Chem. 2023; 11:1161462; and patent publications U.S. Pat. Nos. 5,763,594, 9,650,406, US20200216891; WO2004/018497; and WO 2014/139596; all of which are incorporated by reference) In some embodiments, the modified sugar moiety is a 3′-O-phosphate.

[0402] In some embodiments, the modified NDP substrate comprises modified 2′- and 3′-positions of the sugar moiety, such as described herein. Exemplary modified NDP substrates with modified 2′- and 3′-positions include, among others, 2′-fluoro or 2′-O-methyl, and 3′-O-allyl, 3′-O-(2-nitrobenzyl), 3′-O-azidomethyl (O—CH₂N₃), 3′-O-tert-butyldithiomethyl, or 3′-phosphate. Other such modifications are described herein.

[0403] In some embodiments, the modified sugar moiety of the NDP substrate in the compositions comprises a “locked” nucleotide (e.g., locked NDP). In some embodiments, the locked NDP is a locked ADP, locked GDP, locked CDP, locked TDP, or locked UDP.

[0404] In some embodiments of the composition, the modified NDP substrate comprises a modified phosphate. In some embodiments, the modified nucleoside diphosphate comprises an alpha-thiodiphosphate (NDPαS). In some embodiments, the NDPαS substrate is (Rp)-NDPαS, (Sp)-NDPaS, or a mixture of (Rp)-NDPαS and (Sp)-NDPαS, as further described herein.

[0405] In some embodiments, the modified NDP substrate comprises a modified nucleobase. In some embodiments, the modified nucleobases is 5-bromo-uracil, 5-iodo-uracil, 6-mCEPh-purine, 6-phenylpyrrolocytidine, N2-alkyl 8-oxoguanosine, difluorotoluene, difluorobenzene, dichlorobenzene, imidazole, or benzimidazole. Other nucleobases are described herein.

[0406] In some embodiments, the composition further comprises a phosphate donor for the acetate kinase, for example, acetyl phosphate or propionyl phosphate. Suitable concentrations are provided herein.

[0407] In some embodiments, the composition comprises an engineered acetate kinase and one or more components of an NTP regenerating system. In some embodiments, the components of the NTP regeneration system includes, among others, pyruvate kinase, creatine kinase, R-acetate kinase, and/or polyphosphate kinase. As used herein, “R-acetate kinase” refers to an acetate kinase that functions in regenerating NTP from NDP, particularly ATP from ADP, such as for, by way of example and limitation, coupled reactions that include adenylate kinase and/or adenosine kinase for synthesis of NTP from a nucleoside and/or NMP. In some embodiments, the “R-acetate kinase” In some embodiments, the acetate kinase used for the regeneration of NTP is the same acetate kinase used for converting substrate NDP to NTP. In some embodiments, the acetate kinase used for the regeneration of NTP from NDP is different from the acetate kinase used for the conversion of substrate NDP to NTP. In some embodiments, an R-acetate kinase that efficiently regenerates ATP from ADP is used for ATP regeneration and another acetate kinase used for the conversion of substrate NDP to product NTP, such as where the other acetate kinase is more efficient at conversion of substrate NDP to product NTP, for example, where the substrate NDP comprises a modified NDP (e.g., having 2′- and/or 3′-modifications).

[0408] In some embodiments, the components of the NTP regeneration system includes a substrate (i.e., phosphate donor) for the enzyme in the NTP regenerating system, for example, phosphoenolpyruvate, creatine phosphate, and polyphosphate depending on the ATP regeneration system.

[0409] In some embodiments, the composition comprises an engineered acetate kinase and one or more components of an acetyl phosphate regenerating system. In some embodiments, the acetyl phosphate regenerating system comprises pyruvate oxidase, and substrate pyruvate and phosphate, generally inorganic phosphate. Suitable concentrations of pyruvate and phosphate are provided below.

[0410] In some embodiments, the composition comprises an immobilized engineered acetate kinase, as described herein. In some embodiments, the immobilized acetate kinase is immobilized with other enzymes, e.g., an adenosine kinase, adenylate kinase, and/or 3′-O-kinase.

### Uses and Methods

[0411] In another aspect, the present disclosure provides uses of the engineered acetate kinase enzymes, either alone or in combination with other enzymes. In some embodiments, the engineered acetate kinase is used in the production of nucleoside triphosphate (NTP) from nucleoside diphosphate (NDP). In some embodiments, a method of converting nucleoside diphosphate to nucleoside triphosphate comprises contacting a nucleoside diphosphate with an engineered acetate kinase described herein in the presence of phosphate donor under suitable reaction conditions for conversion of the nucleoside diphosphate to the corresponding product nucleoside triphosphate.

[0412] In some embodiments, the nucleoside diphosphate substrate is a naturally occurring or unmodified nucleoside diphosphate. In some embodiments, unmodified nucleoside diphosphate refers to nucleosides present in naturally occurring DNA or mRNA, where the nucleosides have a 5′-diphosphate.

[0413] In some embodiments, the nucleoside diphosphate comprises a nucleobase selected from adenine, cytosine, guanine, thymine, uracil, xanthine, hypoxanthine, 2,6-diaminopurine, purine, 6,8-diaminopurine, 5-methylcytosine (m5° C.), 2-thiouridine, pseudouridine, dihydrouridine, inosine, and 7-methylguanosine (m7G). In some embodiments, the nucleoside diphosphate has at the 2′-position of the sugar moiety a H or OH.

[0414] In some embodiments, the unmodified nucleoside diphosphate is ADP, GDP, UDP, CDP, or TDP, and wherein the nucleoside has at the 2′-position of the sugar moiety an OH, thereby by resulting in corresponding product rATP, rGTP, rUTP, rCTP, or rTTP, respectively.

[0415] In some embodiments, the unmodified nucleoside diphosphate is ADP, GDP, UDP, CDP, or TDP, and wherein the nucleoside has at the 2′-position of the sugar moiety an H, thereby by resulting in corresponding product dATP, dGTP, dUTP, dCTP, or dTTP, respectively.

[0416] In some embodiments of the method, the nucleoside diphosphate substrate is a modified nucleoside diphosphate, thereby resulting in production of the corresponding modified nucleotide triphosphate. In some embodiments, the modified nucleotide is modified in the sugar moiety, the nucleobase, or phosphate, or any combination of modified sugar moiety, nucleobase, and phosphate.

[0417] In some embodiments of the method, the modified nucleoside diphosphate comprises a modified sugar moiety. In some embodiments, the modified sugar moiety is modified at the 2; -position and/or 3′-position of the sugar moiety.

[0418] In some embodiments, the modified sugar moiety is a modified at the 2′-position of the sugar moiety. In some embodiments, the modified 2′-position is a halo, 2′-O—R′, or 2′-O—COR′, where R′ is an alkyl, alkyloxyalkyl, cycloalkyl, heterocyclyl, aryl, heteroaryl, cycloalkylalkyl, heterocyclylalkyl, arylalkyl, or heteroarylalkyl. In some embodiments, R′ is a C₁-C₄alkyl. In some embodiments, the modified 2′-position is a 2′-O—R′, wherein in R′ is alkyloxyalkyl, alkylamine, cyanoalkyl, or —C(O)-alkyl. In some embodiments, the 2′-position of the sugar moiety of the nucleoside substrate is —O—R′, wherein R′ is —CH₃ or —CH₂CH₃ or —CH₂CH₂OCH₃. In some embodiments, the modified 2′-position is 2′-O-(2-methoxyethyl), 2′-O-allyl, 2′-O-propargyl, 2′-O-ethylamine, 2′-O-cyanoethyl, or 2′-O-acetalester.

[0419] In some embodiments, the 2′-position of the sugar moiety is halo. In some embodiments, the 2′-position of the sugar moiety is halo is F (i.e., 2′-F) or Br (i.e., 2′-Br).

[0420] In some embodiments, the modified sugar moiety of the NDP substrate is a “locked” nucleotide (e.g., locked NDP). In some embodiments, the locked NDP is a locked ADP, locked GDP, locked CDP, locked TDP, or locked UDP. In some embodiments, the ribose moiety of the locked nucleoside is in the C3′-endo (beta-D) or C2′-endo (alpha-L) conformation. In some embodiments, the locked nucleoside has a methylene bridge. In some embodiments, the locked nucleoside has an ethylene bridge. Various locked nucleotides are described in, for example, WO 99/014226, WO 00/66604, WO 98/039352, WO 2004/046160, WO 00/047599, WO 2007/134181, WO 2010/077578, WO 2010/036698, WO 2007/090071, WO 2009/006478, WO 2011/156202, WO 2008/154401, WO 2009/067647, WO 2008/150729, Morita et al., Bioorganic & Med. Chem. Lett. 2002, 12, 73-76, Seth et al. J. Org. Chem. 2010, Vol 75 (5) pp. 1569-81, and Mitsuoka et al., Nucleic Acids Research 2009, 37 (4), 1225-1238, and Wan and Seth, J. Medical Chemistry 2016, 59, 9645-9667.

[0421] In some embodiments, the modified NDP substrate has a modified 3′-position of the sugar moiety. In some embodiments, the 3′-position of the sugar moiety is modified with a blocking group, preferably a reversible blocking group. In some embodiments, the blocking group is a formate, benzoylformate, acetate, propionate, isobutyrate, aminoxy (—ONH₂), O-methyl, O-methoxymethyl, O-methylthiomethyl, O-benzyloxymethyl, O-allyl, 3′-O-(2-nitrobenzyl), O-azidomethyl (O—CH₂N₃), O-tert-butyldithiomethyl, phosphate, or triphosphate. Reversible 3′-blocked nucleoside/nucleotides are described in Chen et al., Genomics, Proteomics & Bioinformatics, 2013, 11 (1): 34-40, Metzker et al., Nucleic Acids Res., 1994, 22 (20): 4259-4267; and patent publications U.S. Pat. Nos. 5,763,594, 9,650,406, US20200216891; WO2004/018497; and WO 2014/139596; all of which are incorporated by reference). In some embodiments, the modified sugar moiety is a 3′-O-phosphate. For example, a modified NDP substrate with a 3′-O-phosphate has the structure ppNp, where the 3′-OH of the sugar moiety is modified with a phosphate.

[0422] In some embodiments, the modified NDP substrate comprises a modified nucleobase with a modification at the 2′- and the 3′-position of the sugar moiety. In some embodiments, any modification at the 2′-position of the sugar moiety is combined with any compatible modification at the 3′-position of the sugar moiety. In some embodiments, the modified NDP substrate a 2′-modification, including the 2′-modifications described herein, and a 3′-modification comprising a 3′-blocking group, particularly a 3′-reversible blocking group. In some embodiments, the 2′-modification is-2′-O-(2-methoxyethyl), 2′-O-allyl, 2′-O-propargyl, 2′-O-ethylamine, 2′-O-cyanoethyl, 2′-O-acetalester, 2′-O-methyl, 2′-O-ethyl, or 2′-fluoro, and the 3′-modification is 3′-O-methyl, 3′-O-methoxymethyl, 3′-O-methylthiomethyl, 3′-O-benzyloxymethyl, 3′-O-allyl, 3′-O-(2-nitrobenzyl), 3′-O-azidomethyl (O—CH₂N₃), 3′-O-tert-butyldithiomethyl, phosphate, or triphosphate. Exemplary modified NDP substrates with a 2′- and 3′-modified sugar moiety, include among others, 2′-fluoro-ADP-3′-phosphate, 2′-fluoro-GDP-3′-phosphate, 2′-fluoro-UDP-3′-phosphate, 2′-fluoro-CDP-3′-phosphate, 2′-fluoro-TDP-3′-phosphate, 2′-O-methyl-ADP-3′-phosphate, 2′-O-methyl-GDP-3′-phosphate, 2′-O-methyl-UDP-3′-phosphate, 2′-O-methyl-CDP-3′-phosphate, and 2′-O-methyl-TDP-3′-phosphate.

[0423] In some embodiments of the method, the modified nucleoside diphosphate comprises a modified nucleobase. In some embodiments, the modified nucleobase is 5-bromo-uracil, 5-iodo-uracil, 6-mCEPh-purine, 6-phenylpyrrolocytidine, N2-alkyl 8-oxoguanosine, difluorotoluene, difluorobenzene, dichlorobenzene, imidazole, or benzimidazole.

[0424] In some embodiments, the nucleobase of the nucleoside diphosphate substrate is, among others, 5-methylcytosine, pyridin-4-one, pyridin-2-one, phenyl, pseudouracil, 3-methyl uracil, dihydrouridine, naphthyl, aminophenyl, 5-alkylcytidines, 5-alkyluridines, 5-halouridines, 6-azapyrimidines, 6-alkylpyrimidines, 5-(1-propynyl)-uridine, 5-(1-propynyl)-cytidine, quesosine, 2-thiouridine, 4-thiouridine, 4-acetyltidine, 5-(carboxyhydroxymethyl) uridine, 5-carboxymethylaminomethyl-2-thiouridine, 5-carboxymethylaminomethyluridine, -D-galactosylqueosine, 1-methyladenosine, 1-methylinosine, 2,2-dimethylguanosine, 3-methylcytidine, 2-methyladenosine, 2-methylguanosine, N6-methyladenosine, 7-methylguanosine, 5-methoxyaminomethyl-2-thiouridine, 5-methylaminomethy luridine, 5-methylcarbonylmethyluridine, 5-methyloxyuridine, 5-methyl-2-thiouridine, 2-methylthio-N6-isopentenyladenosine, -D-mannosylqueosine, uridine-5-oxyacetic acid, 2-thiocytidine, N1-methyl-adenine, N6-methyl-adenine, 8′-azido-adenine, N,N-dimethyl-adenosine, aminoally 1-adenosine, 5′-methy 1-uridine, pseudouridine, NO-methyl-pseudouridine, 5′-hydroxy-N1-methyluridine, 2′-thio-uridine, 4′-thio-uridine, hypoxanthine, xanthine, 5′-methyl-cytidine, 5′-hydroxy-methyl-cytidine, 6′-thio-guanine, or NO-methyl-guanine.

[0425] In some embodiments of the method, the modified nucleoside diphosphate comprises a modified phosphate. In some embodiments, the modified nucleoside diphosphate comprises an alpha-thiodiphosphate (NDPαS), thereby resulting in product nucleoside 5′-1-thiotriphosphate (NTPαS). In some embodiments, the NDPαS substrate is (Rp)-NDPαS, (Sp)-NDPαS, or a mixture of (Rp)-NDPαS and (Sp)-NDPαS diastereomer. In some embodiments, the method further comprises the step of separating (Rp)-NTPαS and (Sp)-NTPαS diastereomers by selective reaction of one or other isomer to give one or other product (Rp)-NTPαS or (Sp)-NTPαS.

[0426] It is to be understood that the NDPαS can have a modified nucleoside, e.g., modification of the sugar residue at the 2′- and/or 3′-positions, a modified nucleobase, or any combinations thereof as described herein. Exemplary modified NDPαS substrates with a 2′-modified sugar moiety, include among others, 2′-fluoro-ADPαS, 2′-fluoro-GDPαS, 2′-fluoro-UDPαS, 2′-fluoro-CDPαS, 2′-fluoro-TDPαS, 2′-O-methyl-ADPαS, 2′-O-methyl-GDPαS, 2′-O-methyl-UDPαS, 2′-O-methyl-CDPαS, and 2′-O-methyl-TDPαS. Exemplary modified NDPαS substrates with a 3′-modified sugar moiety, include among others, ADPαS-3′-phosphate, GDPαS-3′-phosphate, UDPαS-3′-phosphate, CDPAS-3′-phosphate, and TDPαS-3′-phosphate. Exemplary modified NDPαS substrates with a 2′- and 3′-modified sugar moiety, include among others, 2′-fluoro-ADPαS-3′-phosphate, 2′-fluoro-GDPαS-3′-phosphate, 2′-fluoro-UDPαS-3′-phosphate, 2′-fluoro-CDPαS-3′-phosphate, 2′-fluoro-TDPαS-3′-phosphate, 2′-O-methyl-ADPαS-3′-phosphate, 2′-O-methyl-GDPαS-3′-phosphate, 2′-O-methyl-UDPαS-3′-phosphate, 2′-O-methyl-CDPαS-3′-phosphate, and 2′-O-methyl-TDPαS-3′-phosphate.

[0427] In some embodiments of the method, the phosphate donor is acetyl phosphate or pyrophosphate. In some embodiments, the phosphate donor is provided in salt form, for example sodium acetyl phosphate, lithium acetyl phosphate, potassium acetyl phosphate, or lithium-potassium acetyl phosphate. In some embodiments, the reaction conditions further include buffers, salts, and/or divalent metals to promote acetate kinase mediated conversion of an NDP substrate to NTP product. In some embodiments, the acetyl phosphate or equivalent thereof, preferably as a salt, e.g., lithium potassium acetyl phosphate, is present at a concentration of about 1 mM to 150 mM, 5 mM to 125 mM, 10 mM to 100 mM, 20 mM to 80 mM, or 40 mM to 60 mM. In some embodiments, the acetyl phosphate is present at a concentration of about 1 mM, 5 mM, 10 mM, 20 mM, 30 mM, 40 mM, 50 mM, 60 mM, 80 mM, 100 mM, 125 mM, or 150 mM. In some embodiments, the acetyl phosphate concentration is adjusted to lower levels, e.g., below 100 mM, where an acetyl phosphate regenerating system, such as pyruvate oxidase, is used.

[0428] In some embodiments, the engineered acetate kinase is used for the conversion of acetate to acetyl phosphate using an NTP as a phosphate donor. In some embodiments, the method for converting acetate to acetyl phosphate comprises contacting acetate with an engineered acetate kinase described herein in the presence of NTP under suitable reaction conditions to convert the nucleoside diphosphate to the corresponding product acetyl phosphate and NDP. In some embodiments, the NTP is ATP.

[0429] In some embodiments, the phosphate donor NTP when present is at a concentration of about 0.001 mM to 1 mM, 0.005 mM to 0.5 mM, 0.01 mM to 0.4 mM, 0.05 mM to 0.3 mM, or 0.1 mM to 0.2 mM. In some embodiments, the phosphate donor NTP is present at a concentration of about 0.001 mM, 0.005 mM, 0.01 mM, 0.05 mM, 0.1 mM, 0.2 mM, 0.5 mM, or 1 mM.

[0430] In some embodiments, the method further comprises an acetyl phosphate regenerating or recycling system for regenerating acetyl phosphate from the acetate produced by the acetate kinase reaction. In some embodiments, the acetyl phosphate regenerating system comprises a pyruvate oxidase and substrate pyruvate and phosphate. In some embodiments, the pyruvate oxidase converts acetate to acetyl phosphate using inorganic phosphate. Various pyruvate oxidases are known in the art. In some embodiments, the pyruvate oxidases are homologs of pyruvate oxidases. In some embodiments, the pyruvate oxidase is a pyruvate oxidase of Bifidobacterium mongoliense (A0A087C4V4), Alkalibacterium subtropicum (A0A1I1KLE2), Pisciglobus halotolerans (A0A1I3CCM7), Jeotgalibaca sp PTS2502 (A0A1U7E9W7), Vagococcus fluvialis (A0A812AXT4), Candidatus Gracilibacteria bacterium (A0A2M7FGE0), Bavariicoccus seileri (A0A3D4S346), Bifidobacterium aquikefiri (A0A261G4D1), Aerococcus urinae (F218Y6), or Aerococcus suis (A0A1W1YA59). In the foregoing, the database accession numbers (e.g., UniProt, Genbank, etc.), which provide the amino acid sequence, are shown in parentheses. In some embodiments, the pyruvate oxidase is an engineered pyruvate oxidase described in U.S. provisional application No. 63/661,199, filed Jun. 18, 2024, incorporated by reference herein. Suitable concentrations of pyruvate and phosphate include, among others, 1 mM-2 M, 2 mM-1.8 M, 5 mM-1.5 M, 10 mM-1 M, 20 mM-750 mM, 50 mM-500 mM, 100 mM-400 mM, and 150-300 mM. In some embodiments, the pyruvate and phosphate are at concentrations of about 1 mM, 2 mM, 5 mM, 10 mM, 20 mM, 50 mM, 100 mM, 150 mM, 200 mM, 300 mM, 400 mM, 500 mM, 750 mM, 1 M, 1.5 M, 1.8 M, or 2 M.

[0431] In some embodiments, the method further comprises a catalase, which converts H₂O₂ produced by the pyruvate oxidase to H₂O and O₂. Various suitable catalases are known in the art. In some embodiments, the catalase can be the catalase of Archaeoglobus fulgidus, Bacillus stearothermophilus, E. coli, Mycobacterium intracellulare, Synechococcus sp PCC7942, Arabidopsis thaliana, Pisum sativum, or Saccharomyces cerevisiae (see, e.g., Zamocky, M., Progress in Biophysics and Molecular Biology, 1999, 72 (1): 19-66); see also WO1992017571). In some embodiments, the catalase is a catalase of Bos taurus (P00432), Aspergillus niger (A0A254TZH3), Helicobacter pylori (JON6C6), Drosophila melanogaster (P17336) and Rattus norvegicus (P04762).

[0432] In the embodiments provided herein and illustrated in the Examples, various ranges of suitable reaction conditions that can be used in the processes, include but are not limited to, substrate loading, co-substrate loading, pH, temperature, buffer, solvent system, cofactor, polypeptide loading, and reaction time. Further suitable reaction conditions for carrying out the process for biocatalytic conversion of substrate compounds to product compounds using the enzymes described herein can be supplemented in view of the guidance provided herein to the skilled artisan, including, but not limited to, contacting the enzymes and one or more substrate compounds under experimental reaction conditions of concentration, pH, temperature, and solvent conditions, and detecting the product compound. The present disclosure contemplates any suitable reaction conditions that may find use in the methods described herein.

[0433] In some embodiments, the substrate compound in the reaction mixtures can be varied, taking into consideration, for example, the desired amount of product compound, the effect of each substrate concentration on enzyme activity, stability of enzyme under reaction conditions, and the percent conversion of each substrate to product. In some embodiments, the suitable reaction conditions comprise a substrate compound loading of at least about 0.1 uM to 1 uM, 1 uM to 2 uM, 2 uM to 3 uM, 3 uM to 5 uM, 5 uM to 10 uM, or 10 uM to 100 uM or greater. In some embodiments, the suitable reaction conditions comprise a substrate compound (e.g., NDP) loading of about 0.1 mM to 200 mM, 0.5 mM to 180 mM, 1 mM to 150 mM, 2 mM to 120 mM, 5 mM to 100 mM, 10 mM to 80 mM, or 20 mM to 60 mM. In some embodiments, the suitable reactions conditions comprise a substrate compound loading of about 0.1 mM, 0.5 mM, 1 mM, 2 mM, 5 mM, 10 mM, 20 mM, 60 mM, 80 mM, 100 mM, 120 mM, 150 mM, 180 mM, or 200 mM, and as described herein.

[0434] In some embodiments, the suitable reaction conditions comprise a substrate compound loading of at least about 0.5 to about 25 g/L, 1 to about 25 g/L, 5 to about 25 g/L, about 10 to about 25 g/L, 20 to about 25 g/L, or about 30 to about 60 g/L. In some embodiments, the suitable reaction conditions comprise a substrate compound loading of at least about 0.5 g/L, at least about 1 g/L, at least about 5 g/L, at least about 10 g/L, at least about 15 g/L, at least about 20 g/L, at least about 30 g/L, at least about 40 g/L, at least about 50 g/L, or at least about 60 g/L, or even greater.

[0435] In carrying out the processes described herein, the enzymes may be added to the reaction mixture in the form of a purified enzyme, partially purified enzyme, whole cells transformed with gene(s) encoding the enzyme, as cell extracts and/or lysates of such cells, and/or as an enzyme immobilized on a solid support. Whole cells transformed with gene(s) encoding the enzyme(s) or cell extracts, lysates thereof, and isolated enzymes may be employed in a variety of different forms, including solid (e.g., lyophilized, spray-dried, and the like) or semisolid (e.g., a crude paste). The cell extracts or cell lysates may be partially purified by precipitation (ammonium sulfate, polyethyleneimine, heat treatment or the like, followed by a desalting procedure prior to lyophilization (e.g., ultrafiltration, dialysis, etc.). Any of the enzyme preparations (including whole cell preparations) may be stabilized by crosslinking using known crosslinking agents, such as, for example, glutaraldehyde or immobilization to a solid phase (e.g., Eupergit C, and the like).

[0436] In some embodiments, the gene(s) encoding the polypeptides can be transformed into host cell separately or together into the same host cell. For example, in some embodiments one set of host cells can be transformed with gene(s) encoding one polypeptide and another set can be transformed with gene(s) encoding another polypeptide. Both sets of transformed cells can be utilized together in the reaction mixture in the form of whole cells, or in the form of lysates or extracts derived therefrom. In other embodiments, a host cell can be transformed with gene(s) encoding multiple polypeptides. In some embodiments the polypeptides can be expressed in the form of secreted polypeptides and the culture medium containing the secreted polypeptides can be used for the synthesis reaction.

[0437] In some embodiments, the improved activity of the engineered acetate kinase polypeptides disclosed herein provides for processes wherein higher percentage conversion can be achieved with lower concentrations of the engineered polypeptide. In some embodiments of the process, the suitable reaction conditions comprise an engineered polypeptide amount of about 0.1% w/w, 0.2% (w/w), 0.5% (w/w), 1% (w/w), 2% (w/w), 5% (w/w), 10% (w/w), 20% (w/w), 30% (w/w), 40% (w/w), 50% (w/w), 75% (w/w), 100% (w/w) or more of substrate compound loading.

[0438] In some embodiments, the engineered polypeptide is present at a molar ratio of engineered polypeptide to substrate of about 50 to 1, 25 to 1, 10 to 1, 5 to 1, 1 to 1, 1 to 5, 1 to 10, 1 to 25 or 1 to 50. In some embodiments, the engineered polypeptide is present at a molar ratio of engineered polypeptide to substrate from a range of about 50 to 1 to a range of about 1 to 50 or 1 to 100.

[0439] In some embodiments, the engineered polypeptide is present at about 0.01 g/L to about 50 g/L; about 0.01 to about 0.1 g/L; about 0.05 g/L to about 50 g/L; about 0.1 g/L to about 40 g/L; about 1 g/L to about 40 g/L; about 2 g/L to about 40 g/L; about 5 g/L to about 40 g/L; about 5 g/L to about 30 g/L; about 0.1 g/L to about 10 g/L; about 0.5 g/L to about 10 g/L; about 1 g/L to about 10 g/L; about 0.1 g/L to about 5 g/L; about 0.5 g/L to about 5 g/L; or about 0.1 g/L to about 2 g/L. In some embodiments, the acetate-kinase polypeptide is present at about 0.01 g/L, 0.05 g/L, 0.1 g/L, 0.2 g/L, 0.5 g/L, 1, 2 g/L, 5 g/L, 10 g/L, 15 g/L, 20 g/L, 25 g/L, 30 g/L, 35 g/L, 40 g/L, or 50 g/L.

[0440] In the embodiments of the process, the reaction conditions comprise a suitable pH. The desired pH or desired pH range can be maintained by use of an acid or base, an appropriate buffer, or a combination of buffering and acid or base addition. The pH of the reaction mixture can be controlled before and/or during the course of the reaction. In some embodiments, the suitable reaction conditions comprise a solution pH from about 4 to about 10, pH from about 5 to about 10, pH from about 5 to about 9, pH from about 6 to about 9, pH from about 6 to about 8. In some embodiments, the reaction conditions comprise a solution pH of about 4, 4.5, 5, 5.5, 6, 6.5, 7, 7.5, 8, 8.5, 9, 9.5, or 10.

[0441] In some embodiments, in the course of the reaction, the pH of the reaction mixture may change. The pH of the reaction mixture may be maintained at a desired pH or within a desired pH range, for example, among others, by the addition of an acid or a base, before and/or during the course of the reaction. Alternatively, the pH may be controlled by using a buffer. Accordingly, in some embodiments, the reaction condition comprises a buffer. Suitable buffers to maintain desired pH ranges are known in the art and include, by way of example and not limitation, borate, potassium phosphate, 2-(N-morpholino) ethane sulfonic acid (MES), 3-(N-morpholino) propanesulfonic acid (MOPS), acetate, triethanolamine, and 2-amino-2-hydroxymethyl-propane-1,3-diol (Tris), and the like. In some embodiments, the buffer is present in a concentration of 1 mM-500 mM, 5 mM to 450 mM, 10 mM to 400 mM, 20 mM to 350 mM, 30 mM to 300 mM, 40 mM to 200 mM, or 50 mM to 100 mM. In some embodiments, the buffer is present in the composition at about 1 mM, 5 mM, 10 mM, 20 mM, 30 mM, 40 mM, 50 mM, 100 mM, 150 mM, 200 mM, 250 mM, 300 mM, 350 mM, 400 mM, 450 mM or 500 mM. In some embodiments, the reaction conditions comprise water as a suitable solvent with no buffer present.

[0442] In the embodiments of the processes herein, a suitable temperature is used for the reaction conditions, for example, taking into consideration the increase in reaction rate at higher temperatures, and the activity of the enzyme during the reaction time period. In some embodiments, the suitable reaction conditions comprise a temperature of about 10° C. to about 95° C., about 10° C. to about 75° C., about 15° C. to about 95° C., about 20° C. to about 95° C., about 20° C. to about 65° C., about 25° C. to about 70° C., or about 50° C. to about 70° C. In some embodiments, the suitable reaction conditions comprise a temperature of about 10° C., 15° C., 20° C., 25° C., 30° C., 35° C., 40° C., 45° C., 50° C., 55° C., 60° C., 65° C., 70° C., 75° C., 80° C., 85° C., 90° C., or 95° C. In some embodiments, the temperature during the enzymatic reaction can be maintained at a specific temperature throughout the course of the reaction. In some embodiments, the temperature during the enzymatic reaction can be adjusted over a temperature profile during the course of the reaction.

[0443] In some embodiments, the processes are carried out in a solvent. Suitable solvents include water, aqueous buffer solutions, organic solvents, polymeric solvents, and/or co-solvent systems, which generally comprise aqueous solvents, organic solvents and/or polymeric solvents. The aqueous solvent (water or aqueous co-solvent system) may be pH-buffered or unbuffered. In some embodiments, the processes using the engineered acetate kinase polypeptides can be carried out in an aqueous co-solvent system comprising an organic solvent (e.g., ethanol, isopropanol (IPA), dimethyl sulfoxide (DMSO), dimethylformamide (DEF) ethyl acetate, butyl acetate, 1-octanol, heptane, octane, methyl t butyl ether (MTBE), toluene, and the like), ionic or polar solvents (e.g., 1-ethyl 4 methylimidazolium tetrafluoroborate, 1-butyl-3-methylimidazolium tetrafluoroborate, 1-butyl 3 methylimidazolium hexafluorophosphate, glycerol, polyethylene glycol, and the like). In some embodiments, the co-solvent can be a polar solvent, such as a polyol, dimethylsulfoxide (DMSO), or lower alcohol. The non-aqueous co-solvent component of an aqueous co-solvent system may be miscible with the aqueous component, providing a single liquid phase, or may be partly miscible or immiscible with the aqueous component, providing two liquid phases. Exemplary aqueous co-solvent systems can comprise water and one or more co-solvents selected from an organic solvent, polar solvent, and polyol solvent. In general, the co-solvent component of an aqueous co-solvent system is chosen such that it does not adversely inactivate the enzymes under the reaction conditions. Appropriate co-solvent systems can be readily identified by measuring the enzymatic activity of the specified enzymes with a defined substrate of interest in the candidate solvent system, utilizing an enzyme activity assay, such as those described herein.

[0444] In some embodiments of the process, the suitable reaction conditions comprise an aqueous co-solvent, where the co-solvent comprises DMSO at about 1% to about 50% (v/v), about 1 to about 40% (v/v), about 2% to about 40% (v/v), about 5% to about 30% (v/v), about 10% to about 30% (v/v), or about 10% to about 20% (v/v). In some embodiments of the process, the suitable reaction conditions can comprise an aqueous co-solvent comprising ethanol at about 1% (v/v), about 5% (v/v), about 10% (v/v), about 15% (v/v), about 20% (v/v), about 25% (v/v), about 30% (v/v), about 35% (v/v), about 40% (v/v), about 45% (v/v), or about 50% (v/v).

[0445] In some embodiments, the reaction conditions comprise a surfactant for stabilizing or enhancing the reaction. Surfactants can comprise non-ionic, cationic, anionic and/or amphiphilic surfactants. Exemplary surfactants, include by way of example and not limitation, nonyl phenoxypolyethoxylethanol (NP40), TRITON™ X-100 polyethylene glycol tert-octylphenyl ether, polyoxyethylene-stearylamine, cetyltrimethylammonium bromide, sodium oleylamidosulfate, polyoxyethylene-sorbitanmonostearate, hexadecyldimethylamine, etc. Any surfactant that may stabilize or enhance the reaction may be employed. The concentration of the surfactant to be employed in the reaction may be generally from 0.1 to 50 mg/mL, particularly from 1 to 20 mg/mL.

[0446] In some embodiments, the reaction conditions include an antifoam agent, which aids in reducing or preventing formation of foam in the reaction solution, such as when the reaction solutions are mixed or sparged. Anti-foam agents include non-polar oils (e.g., minerals, silicones, etc.), polar oils (e.g., fatty acids, alkyl amines, alkyl amides, alkyl sulfates, etc.), and hydrophobic (e.g., treated silica, polypropylene, etc.), some of which also function as surfactants. Exemplary anti-foam agents include Y-30® (Dow Corning), poly-glycol copolymers, oxy/ethoxylated alcohols, and polydimethylsiloxanes. In some embodiments, the anti-foam can be present at about 0.001% (v/v) to about 5% (v/v), about 0.01% (v/v) to about 5% (v/v), about 0.1% (v/v) to about 5% (v/v), or about 0.1% (v/v) to about 2% (v/v). In some embodiments, the anti-foam agent can be present at about 0.001% (v/v), about 0.01% (v/v), about 0.1% (v/v), about 0.5% (v/v), about 1% (v/v), about 2% (v/v), about 3% (v/v), about 4% (v/v), or about 5% (v/v) or more as desirable to promote the reaction.

[0447] In some embodiments, the quantities of reactants used in the synthesis reaction will generally vary depending on the quantities of product desired, and concomitantly the amount of substrates employed. Those having ordinary skill in the art will readily understand how to vary these quantities to tailor them to the desired level of productivity and scale of production.

[0448] In some embodiments, the order of addition of reactants is not critical. The reactants may be added together at the same time to a solvent (e.g., monophasic solvent, biphasic aqueous co-solvent system, and the like), or alternatively, some of the reactants may be added separately, and some together at different time points. For example, where applicable, the cofactor, co-substrate and substrate may be added first to the solvent.

[0449] In some embodiments, the reaction components (e.g., enzyme, salts, etc.) may be provided to the reaction in a variety of different forms, including powder (e.g., lyophilized, spray dried, and the like), solution, emulsion, suspension, and the like. The reactants can be readily lyophilized or spray dried using methods and equipment that are known to those having ordinary skill in the art. For example, the protein solution can be frozen at −80° C. in small aliquots, then added to a pre-chilled lyophilization chamber, followed by the application of a vacuum.

[0450] For improved mixing efficiency when an aqueous co-solvent system is used, the polypeptide(s), and co-substrate may be added and mixed into the aqueous phase first. The substrate may be added and mixed in, followed by the organic phase or the substrate may be dissolved in the organic phase and mixed in. Alternatively, the substrate may be premixed in the organic phase, prior to addition to the aqueous phase.

[0451] The processes of the present invention are generally allowed to proceed until further conversion of substrate to product does not change significantly with reaction time (e.g., less than 10% of substrate being converted, or less than 5% of substrate being converted). In some embodiments, the reaction is allowed to proceed until there is complete or near complete conversion of substrate to product. Transformation of substrate to product can be monitored using known methods by detecting substrate and/or product, with or without derivatization. Suitable analytical methods include gas chromatography, HPLC, MS, and the like. In some embodiments, after suitable conversion to product, the reactants are separated from the product and additional reactants are added.

[0452] Any of the processes disclosed herein using the polypeptides for the preparation of products can be carried out under a range of suitable reaction conditions, including but not limited to ranges of substrates, temperature, pH, solvent system, substrate loading, polypeptide loading, cofactor loading, and reaction time. In one example, the suitable reaction conditions for the conversion of a NDP to a NTP comprise: (a) substrate loading of about 1-200 mM NDP substrate; (b) about 0.01 g/L to 5 g/L engineered acetate kinase polypeptide; (c) 1-100 mM MgCl₂; (e) 5 to 100 mM of buffer, e.g., Tris-HCl; (f) 1-100 uM ATP (or NTP); (g) 1 mM to 150 mM acetyl phosphate, (h) pH at 5-9; and (i) temperature of about 15° C. to 70° C. In some embodiments, additional reaction components or additional techniques carried out to supplement the reaction conditions. These can include taking measures to stabilize or prevent inactivation of the enzyme, reduce product inhibition, shift reaction equilibrium to formation of the desired product. In some embodiments, the reaction further includes a pyruvate oxidase, pyruvate, and phosphate for the regeneration of acetyl phosphate.

[0453] As described herein, the methods of using the polypeptides described herein can be carried out using the polypeptides bound or immobilized on a solid support or other support mediums. Methods of polypeptide immobilization are known in the art. In some embodiments, the engineered polypeptides can be bound non-covalently or covalently. Various methods for conjugation and immobilization of enzymes to solid supports (e.g., resins, membranes, beads, glass, etc.) are described in, for example, Yi et al., Proc. Biochem., 2007, 42 (5): 895-898; Martin et al., Appl. Microbiol. Biotechnol., 2007, 76 (4): 843-851; Koszelewski et al., J. Mol. Cat. B: Enzymatic, 2010, 63:39-44; Truppo et al., Org. Proc. Res. Dev., published online: dx.doi.org/10.1021/op200157c; Hermanson, “Bioconjugate Techniques,” 2nd Ed., Academic Press, Cambridge, MA (2008); Mateo et al., Biotechnol. Prog., 2002, 18 (3): 629-34; and “Bioconjugation Protocols: Strategies and Methods,” In “Methods in Molecular Biology,” Niemeyer (ed.), Humana Press, New York, NY (2004); the disclosures of each which are incorporated by reference herein). Solid supports useful for immobilizing the engineered polypeptides of the present disclosure include, but are not limited to, beads or resins comprising polymethacrylate or polyacrylate with epoxide functional groups, polymethacrylate or polyacrylate with amino epoxide functional groups, styrene/DVB copolymer, or polymethacrylate or polyacrylate with octadecyl functional groups. In some embodiments, exemplary solid supports useful for immobilizing the engineered polypeptides of the present invention include, but are not limited to, EnginZyme (including, EziG-1, EziG-1, and EziG-3), chitosan beads, Eupergit C, and SEPABEADs (Mitsubishi) (including EC-EP, EC-HFA/S, EXA252, EXE119 and EXE120).

[0454] In further embodiments, any of the above described processes for the conversion of one or more substrate compounds to product compound can further comprise one or more steps selected from: extraction; isolation; purification; and crystallization of product compound. Methods, techniques, and protocols for extracting, isolating, purifying, and/or crystallizing the product from biocatalytic reaction mixtures produced by the above disclosed processes are known to the ordinary artisan. Additionally, illustrative methods are provided in the Examples below.

### EXAMPLES

[0455] The following Examples, including experiments and results achieved, are provided for illustrative purposes only and are not to be construed as limiting the present invention.

[0456] In the experimental disclosure below, the following abbreviations apply where applicable: ppm (parts per million); M (molar); mM (millimolar), uM and μM (micromolar); nM (nanomolar); mol (moles); gm and g (gram); mg (milligrams); ug and μg (micrograms); L and l (liter); ml and mL (milliliter); ul, uL, μl and μL (microliter); cm (centimeters); mm (millimeters); um and μm (micrometers); sec. (seconds); min(s) (minute(s)); h(s) and hr(s) (hour(s)); U (units); MW (molecular weight); D (daltons); rpm (rotations per minute); ° C. (degrees Celsius); LB (Luria Broth); LiK (lithium-potassium); DNA (deoxyribonucleic acid); and RNA (ribonucleic acid).

### Nucleotide Modifications and Oligonucleotides

Description of Modifications in Oligonucleotide Sequences

| Alias | Description |
|---|---|
| A | 2′-deoxyadenosine |
| C | 2′-deoxycytidine |
| G | 2′-deoxyguanosine |
| T | 2′-deoxythymidine |
| rA | adenosine ribonucleotide |
| rC | cytidine ribonucleotide |
| rG | guanosine ribonucleotide |
| rU | uridine ribonucleotide |
| mA | 2′-methoxyadenosine |
| mC | 2′-methoxycytidine |
| mG | 2′-methoxyguanosine |
| mU | 2′-methoxyuridine |
| * | phosphorothioate linkage |
| /56-FAM/ | 5′-6-carboxyfluorescein |
| /5Phos/ | 5′-phosphorate |
| /3Phos/ | 3′-phosphorate |
| /52FA/ | 2′-fluoroadenosine |
| /52FG/ | 2′-fluoroguanosine |
| /52FU/ | 2′-fluorouridine |
| /52FC/ | 2′-fluorocytidine |
| /i2FU/ | 2′-fluorouridine |
| /i2FC/ | 2′-fluorocytidine |
| /i2FA/ | 2′-fluoroadenosine |
| /i2FG/ | 2′-fluoroguanosine |
| /32FC/ | 2′-fluorocytidine |
| /32FU/ | 2′-fluorouridine |
| /32FA/ | 2′-fluoroadenosine |
| /32FG/ | 2′-fluoroguanosine |

| | SEQ ID | |
|---|---|---|
| Oligonucleotide | NO: | Oligonucleotide sequence |
| T15AT*mG | 591 | TTTTTTTTTTTTTTTAT*mG |
| 5′-6-FAM-T15AT*mG | 592 | /56-FAM/TTTTTTTTTTTTTTTAT*mG |
| T15mGmAmC | 593 | TTTTTTTTTTTTTTTmGmAmC |
| 5′-6-FAM-T15mGmAmC | 594 | /56-FAM/TTTTTTTTTTTTTTTmGmAmC |
| T15AT*mGrG | 595 | TTTTTTTTTTTTTTTAT*mGrG |
| 5′-6-FAM-T15AT*mGrG | 596 | /56-FAM/TTTTTTTTTTTTTTTAT*mGrG |
| T15mGmAmCrG | 597 | TTTTTTTTTTTTTTTmGmAmCrG |
| 5′-6-FAM-T15mGmAmCrG | 598 | /56-FAM/TTTTTTTTTTTTTTTmGmAmCrG |
| T15mGmAmCmU | 869 | TTTTTTTTTTTTTTTmGmAmCmU |
| FAM-T15mGmAmCmU | 870 | /56-FAM/TTTTTTTTTTTTTTTmGmAmCmU |
| T15mGmAmCmG | 871 | TTTTTTTTTTTTTTTmGmAmCmG |
| FAM-T15mGmAmCmG | 872 | /56-FAM/TTTTTTTTTTTTTTTmGmAmCmG |
| T15mGmAmCmG | 1390 | TTTTTTTTTTTTTTTmGmAmC/52FG/ |
| FAM-T15mGmAmCmG | 1391 | /56-FAM/TTTTTTTTTTTTTTTmGmAmC/52FG/ |

### Example 1

### Acetate Kinase (AcK) Selection, Plasmid Construction, and Protein Evolution

[0457] Synthetic genes encoding an N-terminal or C-terminal 6-histidine tagged version of multiple wild-type (WT) acetate kinase (AcK) enzymes were cloned into the pCK110900 vector system (See e.g., U.S. Pat. No. 9,714,437, which is hereby incorporated by reference in its entirety) and subsequently expressed in an E. coli strain derived from W3110.

[0458] Cells transformed with the AcK expression constructs were grown at shake-flask scale using IPTG induction as described below in Example 3. Cells were then lysed, clarified, and the soluble fractions were diluted 20-fold into solution containing 1×SDS-PAGE Running Buffer and Reducing Agent (Invitrogen). Samples were run on a 4-12% Bis-Tris SDS-PAGE gel and stained using AcquaStain Protein Gel Stain (Bulldog Bio). An image of the gel was analyzed using GelAnalyzer v19.1 to quantify the intensity of acetate kinase bands by densitometry. Soluble acetate kinase expression levels are summarized in Table 1.1, show fold improvement in soluble expression level relative to the acetate kinase from Thermotogaceae bacterium (GenBank ID: MCD6267059.1; SEQ ID NO: 2).

TABLE 1.1
Soluble Enzyme Production of Variants Relative to SEQ ID NO: 2

| | | FIOP Soluble Enzyme |
|---|---|---|
| SEQ ID NO: | Source organism of | Expression |
| (nt/aa) | AcK gene sequence | (Relative to SEQ ID NO: 2) |
| 3/4 | Marinitoga sp. 38H-ov | ++ |
| 5/6 | Thermotoga sp. KOL6 | + |
| 7/8 | Thermosipho melaniensis | + |
| 9/10 | Thermotoga sp. RQ7 | + |
| 11/12 | Thermosipho africanus | + |
| 1/2 | Thermotogaceae bacterium | |

Levels of increased soluble enzyme production were determined relative to the reference polypeptide of SEQ ID NO: 2 and defined as follows: “+” 1.12 to 1.22, “++” > 1.22.

### Example 2

### AcK Expression and Lysate Processing for High Throughput (HTP) Screening

### High Throughput (HTP) Growth of AcK Enzyme and Variants

[0459] Transformed E. coli cells were selected by plating onto LB agar plates containing 1% glucose and 30 μg/mL chloramphenicol. After overnight incubation at 37° C., colonies were placed into the wells of 96-well shallow flat bottom NUNC™ (Thermo-Scientific) plates filled with 180 ul/well LB medium supplemented with 1% glucose and 30 μg/mL chloramphenicol. The cultures were allowed to grow overnight for 18-20 hours in a shaker (200 rpm, 30° C., and 85% relative humidity; Kuhner). Overnight growth samples (20 uL) were transferred into Costar 96-well deep plates filled with 380 μL of Terrific Broth supplemented with 30 μg/mL chloramphenicol. The plates were incubated for 120 min in a shaker (250 rpm, 30 C, and 85% relative humidity; Kuhner) until the OD₆₀₀ reached between 0.4-0.8. The cells were then induced with 40 μL of 10 mM IPTG in sterile water and incubated overnight for 18-20 hours in a shaker (250 rpm, 30° C., and 85% relative humidity; Kuhner). The cells were pelleted (4,000 rpm for 20 min), the supernatants were discarded, and the cells were frozen at −80° C. prior to analysis.

Thermal Lysis of HTP Cell Pellets with Lysozyme

[0460] For lysis, 400 μL lysis buffer containing 50 mM triethanolamine buffer, pH 7.5, and 0.1 g/L lysozyme were added to the cell pellet in each well. The cells were shaken vigorously at room temperature for 5 min on a bench top shaker. An aliquot of the re-suspended cells (5-100 uL) was transferred to a 96-well format 200 μL BioRad PCR plate, diluting to 100 uL in lysis buffer if necessary, then briefly spun-down prior to 1 h heat treatment at the temperature indicated, typically 45-60° C. Following heat-treatment, the cell debris was pelleted by centrifugation (4,000 rpm at 4° C. for 10 min), and clear supernatants were then used in biocatalytic reactions to determine their activity levels.

### Example 3

### Shake Flask Expression and Purification of AcK

### Shake Flask Expression

[0461] Selected HTP cultures grown as described above were plated onto LB agar plates with 1% glucose and 30 μg/mL chloramphenicol and grown overnight at 37° C. A single colony from each culture was transferred to 5 mL of LB broth with 1% glucose and 30 μg/mL chloramphenicol. The cultures were grown for 20 h at 30° C., 250 rpm, and subcultured at a dilution of approximately 1:50 into 250 mL of Terrific Broth with 30 μg/mL of chloramphenicol, to a final OD₆₀₀ of about 0.05. The cultures were incubated for approximately 195 min at 30° C., 250 rpm, to an OD₆₀₀ of about 0.6, and then induced with the addition of IPTG at a final concentration of 1 mM. The induced cultures were incubated for 20 h at 30° C., 250 rpm. Following this incubation period, the cultures were centrifuged at 4,000 rpm for 10 min. The culture supernatant was discarded, and the pellets were resuspended in 35 mL of 20 mM triethanolamine, pH 7.5. This cell suspension was chilled in an ice bath and lysed using a Microfluidizer cell disruptor (Microfluidics M-110L). The crude lysate was pelleted by centrifugation (10,000 rpm for 60 min at 4° C.), and the supernatant was then filtered through a 0.2 μm PES membrane to further clarify the lysate.

Purification of AcK from Shake Flask Lysates

[0462] AcK lysates were supplemented with 1/50^{th} volume of SF elution buffer (50 mM Tris-HCl, 500 mM NaCl, 250 mM imidazole, 0.02% v/v Triton X-100 reagent) per well. Lysates were then purified using an AKTA Start purification system and a 5 mL HisTrap FF column (GE Healthcare). The SF wash buffer comprised 50 mM Tris-HCl, 300 mM NaCl, 20 mM imidazole, 0.02% v/v Triton X-100 reagent.

TABLE 3.1
Purification Parameters

| Parameter | Volume |
|---|---|
| Column volume | 5 mL |
| Flow rate | 8-12 mL/min |
| Pressure limit | 0.3 MPa |
| Sample volume | 50 mL |
| Equilibration volume | 5 column volumes (CV) = 25 mL |
| Wash Unbound volume | 20 CV = 100 mLs |
| Elution | Isocratic (step) |
| Elution volume | 5 CV = 25 mLs |
| Fraction volume | 1.5 mLs |
| RE-equilibration volume | 5 CV = 25 mLs |

[0463] Elution fractions containing protein were identified by UV absorption (A280) and pooled, then dialyzed overnight in dialysis buffer (20 mM Tris-HCl, pH 7.4, 100 mM KCl, 0.1 mM EDTA, and 50% glycerol) in a 3.5K Slide-A-Lyzer™ dialysis cassette (Thermo Fisher) for buffer exchange. AdyK concentrations in the preparations were measured by absorption at 280 nm.

### Example 4

### Biosynthetic Cascade Reactions for Production of Nucleotide Triphosphates (NTPs)

### NTP Biosynthetic Reaction Setup

[0464] Reactions were performed in 384-well format 40 μL BioRad PCR plates. AcK variants were assayed in the presence of adenosine kinase (AdoK/5′-O-kinase) and adenylate kinase (AdyK/NMP kinase) variants to enable direct conversion of nucleosides to the corresponding triphosphate. The reactions were set up as follows: (i) all reaction components, except for the nucleoside substrate and the AcK lysate, were premixed in a single solution and were aliquoted into each well of the 384-well plates, (ii) AcK lysate solution was then added into the wells, and (iii) an aliquot of the substrate nucleoside in DMSO was added to initiate the reaction. The reaction plate was heat-sealed with a peelable aluminum seal and incubated in a thermocycler at the indicated temperature and reaction time, then held at 10° C. prior to analysis.

### Example 5

### High-Performance Liquid Chromatography (HPLC) Analysis of Phosphorylated Products

Sample preparation for reaction analysis using HPLC

[0465] The nucleoside substrates, along with their respective 5′-monophosphate (NMP), 5′-diphosphate (NDP), and 5′-triphosphate (NTP) products produced using reactions set up as described in Example 4 were analyzed using HPLC. Mobile phases consisted of 50 mM potassium phosphate (pH 7) with 2 mM tetrabutylammonium hydrogen sulfate (Solvent A), acetonitrile (solvent B), and water (Solvent C). Products were detected by UV absorption at 254 nm. In some instances, a Zorbax RR StableBond Aq, 3.0×150 mm, 3.5 μm (Agilent, #863954-314) column was used. In other instances, a Zorbax RR StableBond Aq, 3.0×100 mm, 3.5 μm (Agilent, #861954-314) column was used, while in other instances, a Zorbax RR StableBond Aq, 2.1×50 mm, 3.5 μm (Agilent, #871700-914) column was used.

### Example 6

### Analysis of NTP Production in Biosynthetic Cascade Using Capillary Electrophoresis

### Coupling of NTP Biosynthetic Reactions to TdT for CE

[0466] For high-throughput (HTP) determination of NTP yield, NTP biosynthetic cascade reactions were terminated with either a heat killed at 95° C. for 2 min or by dilution with 75% methanol. Samples were then diluted into a coupling reaction. The reaction contained 20 mM triethanolamine (TEoA), 0.25 mM CoCl₂, 0.001 units of inorganic pyrophosphatase (New England Biolabs), 4 μM SEQ ID NO: 590 (TdT variant), 12.375 μM unlabeled oligonucleotide and 0.125 μM 5′-6-FAM-labeled oligonucleotide. Reactions were carried out at 50° C. for 60 min, followed by 2 min at 95° C.

### Sample Preparation for Reaction Analysis Using CE

[0467] For analysis of reaction samples, capillary electrophoresis was performed using either an ABI 3500XL Genetic Analyzer (ThermoFisher) or a SeqStudio™ Flex Genetic Analyzer (ThermoFisher). Reactions (1 μL) were quenched by the additions of 19 μL of 1 mM aqueous ethylenediaminetetraacetic acid (EDTA) Quenched reactions were diluted to 1.25 nM oligonucleotide, and a 2-μL aliquot of this solutions was transferred to a new 96-well MicroAmp Optical PCR plate or a 384-well MicroAmp Optical PCR plate containing 18 μL Hi-Di™ Formamide (ThermoFisher) containing the Alexa633 size standard. The ABI 3500XL and SeqStudio™ Flex were configured with POP6 polymer, 50 cm capillaries, and a 55° C. oven temperature. Pre-run settings were 18 kV for 50 sec. Injection was 10 kV for 2 sec, and the run settings were 19 kV for 620-640 sec. FAM-labeled oligo substrates and products were identified by their sizes relative to the sizing ladder.

### Example 7

### Improvements Over SEQ ID NO: 4 in Conversion of Nucleoside Monophosphates to Nucleotides

### HTP Screening for Improved AcK Variants

[0468] Acetate kinase of SEQ ID NO: 4 was selected as the parent adenylate kinase enzyme.

[0469] Libraries of genes were produced from the parent gene using various techniques (e.g. saturation mutagenesis and recombination of previously identified beneficial mutations). The polypeptides encoded by each gene were produced in HTP and prepared as described in Table 7.1.

[0470] Reactions were performed as described in Example 4 using conditions summarized in Table 7.1. Data were collected using the HPLC assay described in Example 5.

TABLE 7.1
Reaction conditions

Lysis Buffer-TEoA (pH 7.5), 0.1 g/L lysozyme; Lysis Conditions-100 μL, 60° C., 60 min;
Reaction buffer-50 mM Tris, 50 mM LiK(acetyl phosphate), 10 μM ATP, 10 mM magnesium
chloride, pH 8.0; Lysate concentration (vol %)-50; Reaction Conditions-50 μL, 30° C., 1 hr;
Nucleoside substrate-A; Substrate Concentration-10 mM; Auxiliary Cascade Enzymes
(AdoK/AdyK)-SEQ ID NO: 568 (1 μM), SEQ ID NO: 580 (1 μM); Quench-75% methanol;
Analytic dilution-40X.

[0471] Activity relative to SEQ ID NO: 4 (Activity FIOP) was calculated based on the percentage of extension products observed for the variant compared with the percentage observed with SEQ ID NO: 4 (where the percent product may be set as the average of replicates or else the highest single sample as appropriate). The results are shown in Table 7.2.

TABLE 7.2
Acetate kinase activity relative to SEQ ID NO: 4

| SEQ ID NO: | Amino Acid Differences | FIOP Percent Product |
|---|---|---|
| (nt/aa) | (Relative to SEQ ID NO: 4) | Relative to SEQ ID NO: 4 |
| 13/14 | V98W | +++ |
| 15/16 | T404M | +++ |
| 17/18 | N137F/S144I | +++ |
| 19/20 | V98M | +++ |
| 21/22 | V77G | +++ |
| 23/24 | K75F | +++ |
| 25/26 | I115S | +++ |
| 27/28 | K75W | +++ |
| 29/30 | A136I | +++ |
| 31/32 | L147V | +++ |
| 33/34 | L147E | +++ |
| 35/36 | L147K/V308A | +++ |
| 37/38 | L15G | +++ |
| 39/40 | K75L | ++ |
| 41/42 | I141Y | ++ |
| 43/44 | K146E | ++ |
| 45/46 | A136V | ++ |
| 47/48 | L120S/P135L | ++ |
| 49/50 | A160C | ++ |
| 51/52 | V217C | ++ |
| 53/54 | P135A | ++ |
| 55/56 | L148M | ++ |
| 57/58 | N301A | ++ |
| 59/60 | A130I | ++ |
| 61/62 | L15T | ++ |
| 63/64 | G11D/S50T | + |
| 65/66 | V156R | + |
| 67/68 | V16N | + |
| 69/70 | S144T/M145C | + |
| 71/72 | P348V | + |
| 73/74 | V98G | + |
| 75/76 | S144C | + |
| 77/78 | K75H | + |
| 79/80 | Y26G | + |
| 81/82 | E66G | + |
| 83/84 | I138L | + |
| 85/86 | G49R | + |
| 87/88 | E66R | + |
| 89/90 | F157L | + |
| 91/92 | V156M | + |
| 93/94 | L147G | + |
| 95/96 | I115Y | + |
| 97/98 | A136K | + |
| 99/100 | Y196L | + |
| 101/102 | K75V | + |
| 103/104 | S270T | + |
| 105/106 | I141C | + |
| 107/108 | Y170L | + |
| 109/110 | L147Y | + |
| 111/112 | K142W | + |
| 113/114 | L147M | + |
| 115/116 | L41M/A97V | + |
| 117/118 | E369N | + |
| 119/120 | L74I | + |
| 121/122 | I52L | + |
| 123/124 | E352S | + |
| 125/126 | F373V | + |
| 127/128 | Q27L | + |
| 129/130 | I115T | + |
| 131/132 | A136R | + |
| 133/134 | P135V | + |
| 135/136 | K280R | + |
| 137/138 | N137I | + |
| 139/140 | L126C | + |
| 141/142 | T404L | + |
| 143/144 | Y285L | + |
| 145/146 | I141R | + |
| 147/148 | S19C | + |
| 149/150 | N137A | + |
| 151/152 | A136M | + |
| 153/154 | G46L | + |
| 155/156 | K142F | + |
| 157/158 | L15I | + |
| 159/160 | N276S | + |
| 161/162 | M145D | + |
| 163/164 | I115G | + |
| 165/166 | G46Q | + |
| 167/168 | M205L | + |
| 169/170 | V77H | + |
| 171/172 | I141W | + |
| 173/174 | I115Q | + |
| 175/176 | V156K | + |

Levels of increased activity were determined relative to the reference polypeptide of SEQ ID NO: 4 and defined as follows: “+” 1.40 to 2.58, “++” > 2.58, “+++” > 4.05.

### Example 8

### Improvements Over SEQ ID NO: 4 in Conversion of Nucleoside Monophosphates to Nucleotides

### HTP Screening for Improved AcK Variants

[0472] Acetate kinase of SEQ ID NO: 4 was selected as the parent acetate kinase enzyme. Libraries of genes were produced from the parent gene using various techniques (e.g. saturation mutagenesis and recombination of previously identified beneficial mutations). The polypeptides encoded by each gene were produced in HTP and prepared as described in Table 8.1.

[0473] Reactions were performed as described in Example 4 using conditions summarized in Table 8.1. Data were collected using the HPLC assay described in Example 5.

TABLE 8.1
Reaction conditions

Lysis Buffer-TEoA (pH 7.5), 0.1 g/L lysozyme; Lysis Conditions-100 μL, 60° C., 60 min;
Reaction buffer-50 mM Tris, 50 mM LiK(acetyl phosphate), 10 μM ATP, 10 mM magnesium
chloride, pH 8.0; Lysate concentration (vol %)-1; Reaction Conditions-1 μL, 30° C., 1 hr;
Nucleoside substrate-G; Substrate Concentration-10 mM; Auxiliary Cascade Enzymes
(AdoK/AdyK)-SEQ ID NO: 570 (10 μM), SEQ ID NO: 582 (10 μM); Dilution into Coupling
Reaction-800X Substrate Oligonucleotides-SEQ ID NO: 591, SEQ ID NO: 592; Product
Oligonucleotides-SEQ ID NO: 595, SEQ ID NO: 596.

[0474] Activity relative to SEQ ID NO: 4 (Activity FIOP) was calculated based on the percentage of extension products observed for the variant compared with the percentage observed with SEQ ID NO: 4 (where the percent product may be set as the average of replicates or else the highest single sample as appropriate). The results are shown in Table 8.2.

TABLE 8.2
Acetate kinase activity relative to SEQ ID NO: 4

| SEQ ID NO: | Amino Acid Differences | FIOP Percent Product |
|---|---|---|
| (nt/aa) | (Relative to SEQ ID NO: 4) | Relative to SEQ ID NO: 4 |
| 31/32 | L147V | +++ |
| 45/46 | A136V | ++ |
| 55/56 | L148M | ++ |
| 75/76 | S144C | ++ |
| 125/126 | F373V | + |
| 167/168 | M205L | + |
| 177/178 | P348S | +++ |
| 179/180 | F313L | +++ |
| 181/182 | P348R | ++ |
| 183/184 | D372R | + |
| 185/186 | L147C | + |
| 187/188 | E352H | + |
| 189/190 | A136L | + |
| 191/192 | N69D | + |
| 193/194 | K68P | + |
| 195/196 | V392I | + |
| 197/198 | I72V | + |

Levels of increased activity were determined relative to the reference polypeptide of SEQ ID NO: 4 and defined as follows: “+” 1.23 to 1.82, “++” > 1.82, “+++” > 2.38.

### Example 9

### Improvements over SEQ ID NO: 4 in Conversion of Nucleoside Monophosphates to Nucleotides

### HTP Screening for Improved AcK Variants

[0475] Acetate kinase of SEQ ID NO: 4 was selected as the parent acetate kinase enzyme. Libraries of genes were produced from the parent gene using various techniques (e.g. saturation mutagenesis and recombination of previously identified beneficial mutations). The polypeptides encoded by each gene were produced in HTP and prepared as described in Table 9.1.

[0476] Reactions were performed as described in Example 4 using conditions summarized in Table 9.1. Data were collected using the HPLC assay described in Example 5.

TABLE 9.1
Reaction conditions

Lysis Buffer-TEoA (pH 7.5), 0.1 g/L lysozyme; Lysis Conditions-100 μL, 75° C., 60 min;
Reaction buffer-50 mM Tris, 50 mM LiK(acetyl phosphate), 10 μM ATP, 10 mM magnesium
chloride, pH 8.0; Lysate concentration (vol %)-10; Reaction Conditions-1 μL, 30° C., 1 hr;
Nucleoside substrate-G; Substrate Concentration-10 mM; Auxiliary Cascade Enzymes
(AdoK/AdyK)-SEQ ID NO: 574 (10 μM), SEQ ID NO: 584 (10 μM); Dilution into Coupling
Reaction-80X; Substrate Oligonucleotides-SEQ ID NO: 591, SEQ ID NO: 592; Product
Oligonucleotides-SEQ ID NO: 595, SEQ ID NO: 596.

[0477] Stability relative to SEQ ID NO: 4 (Stability FIOP) was calculated based on the percentage of extension products observed for the variant compared with the percentage observed with SEQ ID NO: 4 (where the percent product may be set as the average of replicates or else the highest single sample as appropriate). The results are shown in Table 9.2.

TABLE 9.2
Acetate kinase activity relative to SEQ ID NO: 4

| SEQ ID NO: | Amino Acid Differences | FIOP Percent Product |
|---|---|---|
| (nt/aa) | (Relative to SEQ ID NO: 4) | Relative to SEQ ID NO: 4 |
| 13/14 | V98W | + |
| 17/18 | N137F/S144I | + |
| 19/20 | V98M | +++ |
| 29/30 | A136I | +++ |
| 31/32 | L147V | +++ |
| 33/34 | L147E | +++ |
| 39/40 | K75L | + |
| 41/42 | I141Y | + |
| 43/44 | K146E | + |
| 45/46 | A136V | +++ |
| 51/52 | V217C | + |
| 55/56 | L148M | + |
| 57/58 | N301A | + |
| 71/72 | P348V | + |
| 75/76 | S144C | ++ |
| 77/78 | K75H | + |
| 97/98 | A136K | +++ |
| 131/132 | A136R | ++ |
| 141/142 | T404L | + |
| 151/152 | A136M | ++ |
| 161/162 | M145D | + |
| 169/170 | V77H | + |
| 179/180 | F313L | ++ |
| 185/186 | L147C | ++ |
| 189/190 | A136L | ++ |
| 193/194 | K68P | + |
| 199/200 | S50C | + |
| 201/202 | E66A | + |
| 203/204 | V156S | + |
| 205/206 | N276W | + |
| 207/208 | V156A | + |

Levels of increased activity were determined relative to the reference polypeptide of SEQ ID NO: 4 and defined as follows: “+” 1.20 to 1.73, “++” > 1.73, “+++” > 2.24.

### Example 10

### Improvements over SEQ ID NO: 4 in Conversion of Nucleoside Monophosphates to Nucleotides

### HTP Screening for Improved AcK Variants

[0478] Acetate kinase of SEQ ID NO: 4 was selected as the parent adenylate kinase enzyme. Libraries of genes were produced from the parent gene using various techniques (e.g. saturation mutagenesis and recombination of previously identified beneficial mutations). The polypeptides encoded by each gene were produced in HTP and prepared as described in Table 10.1.

[0479] Reactions were performed as described in Example 4 using conditions summarized in Table 10.1. Data were collected using the HPLC assay described in Example 5.

TABLE 10.1
Reaction conditions
Lysis Buffer—TEoA (pH 7.5), 0.1 g/L lysozyme;
Lysis Conditions—100 μL, 60° C., 60 min;
Reaction buffer—50 mM Tris, 50 mM LiK(acetyl phosphate),
10 μM ATP, 10 mM magnesium chloride,
pH 8.0; Lysate concentration (vol %)—2; Reaction
Conditions—1 μL, 30° C., 1 hr;
Nucleoside substrate—G; Substrate Concentration—10 mM;
Auxiliary Cascade Enzymes
(AdoK/AdyK)—SEQ ID NO: 572 (10 μM), SEQ ID NO:
582 (10 μM); Dilution into Coupling Reaction—800X;
Substrate Oligonucleotides—SEQ ID NO: 591, SEQ ID NO: 592;
Product Oligonucleotides—SEQ ID NO: 595, SEQ ID NO: 596.

[0480] Activity relative to SEQ ID NO: 4 (Activity FIOP) was calculated based on the percentage of extension products observed for the variant compared with the percentage observed with SEQ ID NO: 4 (where the percent product may be set as the average of replicates or else the highest single sample as appropriate). The results are shown in Table 10.2.

TABLE 10.2
Acetate kinase activity relative to SEQ ID NO: 4

| SEQ | | FIOP Percent |
|---|---|---|
| ID NO: | Amino Acid Differences | Product Relative |
| (nt/aa) | (Relative to SEQ ID NO: 4) | to SEQ ID NO: 4 |
| 209/210 | N69D/L148M/P348S/D372R/V392I | +++ |
| 211/212 | I52L/N69D/L148M/P348S/V392I | +++ |
| 213/214 | I52L/L148M/P348S/D372R | +++ |
| 215/216 | L147V/M205L/F313L/F373V/I408V | +++ |
| 217/218 | N69D/L148M/P348S/V392I | +++ |
| 219/220 | I52L/P348S/D372R | +++ |
| 221/222 | N69D/L148M/P348S | +++ |
| 223/224 | I52L/A136L/P348S/D372R | +++ |
| 225/226 | L148M/P348S | +++ |
| 227/228 | P348S/D372R/V392I | +++ |
| 229/230 | I52L/P348S/V392I | +++ |
| 231/232 | A136L/P348S | +++ |
| 233/234 | P348S/D372R | +++ |
| 235/236 | N69D/A136L/P348S | +++ |
| 237/238 | A136V/F313L/E352H/F373V/I408V | +++ |
| 239/240 | L147V/F313L/E352H/I408V | +++ |
| 241/242 | I52L/L148M/P348S | ++ |
| 243/244 | L148M/P348R/D372R | ++ |
| 245/246 | L148M/P348R | ++ |
| 247/248 | I52L/A136L/P348S | ++ |
| 249/250 | I52L/N69D/P348R/D372R/V392I | ++ |
| 251/252 | P348S/V392I | ++ |
| 253/254 | L147V/F313L | ++ |
| 255/256 | N69D/L148M/D372R/V392I | ++ |
| 257/258 | A136L/L148M/P348S/V392I | ++ |
| 259/260 | A136L/D372R | ++ |
| 261/262 | P348R/V392I | ++ |
| 263/264 | N69D/P348R/V392I | ++ |
| 265/266 | L147V/M205L | ++ |
| 267/268 | N69D/A136L/D372R/V392I | ++ |
| 269/270 | N69D/A136L/D372R | ++ |
| 271/272 | L147V/M205L/E352H | ++ |
| 273/274 | L148M/D372R | ++ |
| 275/276 | I52L/N69D/P348R/D372R | ++ |
| 277/278 | I52L/N69D/P348R | + |
| 279/280 | A136V/F373V | + |
| 281/282 | K68P/A136V/F313L/I408V | + |
| 283/284 | A136V/M205L/F313L/E352H/I408V | + |
| 285/286 | L147V/E352H/I408V | + |
| 287/288 | I52L/L148M/D372R | + |
| 289/290 | M205L/F313L/E352H | + |
| 291/292 | F313L/E352H/I408V | + |
| 293/294 | S143N/F313L/I408V | + |
| 295/296 | A136V/E352H/F373V | + |
| 297/298 | L147V/E352H | + |
| 299/300 | K68P/F313L | + |
| 301/302 | A136V/M205L/I408V | + |
| 303/304 | K68P/A136V/I408V | + |
| 305/306 | F313L/I408V | + |
| 307/308 | N69D/L148M | + |
| 309/310 | I52L/D372R/V392I | + |
| 311/312 | L148M/V392I | + |
| 313/314 | H5N/I52L/N69D/D372R/V392I | + |
| 315/316 | N69D/A136L/P348R | + |
| 317/318 | A136L/P348R/V392I | + |
| 319/320 | A136V/F313L/E352H | + |
| 321/322 | I52L/L148M/P348R | + |
| 323/324 | A136V/F313L | + |
| 325/326 | I52L/L148M | + |
| 327/328 | D372R/V392I | + |
| 329/330 | I52L/N69D/D372R | + |
| 331/332 | A136V/M205L/F313L | + |
| 333/334 | M205L/P208Q/F313L | + |
| 335/336 | A136V/E352H/I408V | + |
| 337/338 | M205L/F313L | + |
| 339/340 | I52L/A136L | + |
| 341/342 | F313L/E352H | + |
| 343/344 | A136L/L148M/P348R | + |
| 345/346 | A136V/I408V | + |
| 347/348 | A136L/V392I | + |
| 349/350 | K68P/A136V | + |
| 351/352 | A136V/M205L | + |
| 353/354 | N69D/A136L | + |
| 355/356 | I52L/P348R/D372R | + |
| 357/358 | I52L/A136L/D372R/V392I | + |
| 359/360 | I52L/L148M/V392I | + |
| 361/362 | K68P/A136V/M205L/E352H | + |
| 363/364 | M205L/E352H/F373V/I408V | + |
| 365/366 | N69D/V392I | + |
| 367/368 | A136V/M205L/E352H | + |
| 369/370 | M205L/I408V | + |
| 371/372 | M205L/E352H/I408V | + |
| 373/374 | I408V | + |
| 375/376 | I52L/A136L/P348R | + |
| 377/378 | I52L/N69D | + |
| 379/380 | I52L/N69D/V392I | + |
| 381/382 | N69D/A136L/P348R/D372R | + |
| 383/384 | N69D/A136L/L148M/V392I | + |
| 385/386 | K68P/E352H/F373V/I408V | + |
| 387/388 | K68P/E352H | + |
| 389/390 | I52L/V392I | + |
| 391/392 | A136V/L147V/M205L/F373V/I408V | + |
| 393/394 | M205L/E352H | + |

Levels of increased activity were determined relative to the reference polypeptide of SEQ ID NO: 4 and defined as follows: “+” 1.20 to 2.75, “++” > 2.75, “+++” > 4.03.

### Example 11

### Improvements over SEQ ID NO: 254 in Conversion of Nucleoside Monophosphates to Nucleotides

### HTP Screening for Improved AcK Variants

[0481] Acetate kinase of SEQ ID NO: 254 was selected as the parent adenylate kinase enzyme. Libraries of genes were produced from the parent gene using various techniques (e.g. saturation mutagenesis and recombination of previously identified beneficial mutations). The polypeptides encoded by each gene were produced in HTP and prepared as described in Table 11.1.

[0482] Reactions were performed as described in Example 4 using conditions summarized in Table 11.1. Data were collected using the HPLC assay described in Example 5.

TABLE 11.1
Reaction conditions
Lysis Buffer—TEoA (pH 7.5), 0.1 g/L lysozyme; Lysis
Conditions—100 μL, 60° C., 60 min; Reaction buffer—50 mM
Tris, 50 mM Lik(acetyl phosphate), 10 μM ATP, 10 mM magnesium
chloride, pH 8.0; Lysate concentration (vol %)—0.5; Reaction
Conditions—1 μL, 30° C., 1 hr; Nucleoside substrate—G;
Substrate Concentration—10 mM; Auxiliary Cascade Enzymes
(AdoK/AdyK)—SEQ ID NO: 576 (10 μM), SEQ ID NO: 586 (10 μM);
Dilution into Coupling Reaction—800X; Substrate
Oligonucleotides—SEQ ID NO: 593, SEQ ID NO: 594; Product
Oligonucleotides—SEQ ID NO: 597, SEQ ID NO: 598.

[0483] Stability relative to SEQ ID NO: 254 (Stability FIOP) was calculated based on the percentage of extension products observed for the variant compared with the percentage observed with SEQ ID NO: 254 (where the percent product may be set as the average of replicates or else the highest single sample as appropriate). The results are shown in Table 11.2.

TABLE 11.2
Acetate kinase activity relative to SEQ ID NO: 254

| | | FIOP Percent |
|---|---|---|
| SEQ ID NO: | Amino Acid Differences | Product Relative to |
| (nt/aa) | (Relative to SEQ ID NO: 254) | SEQ ID NO: 254 |
| 395/396 | E299V | +++ |
| 397/398 | E299F | +++ |
| 399/400 | E299L | +++ |
| 401/402 | E299T | +++ |
| 403/404 | E299M | +++ |
| 405/406 | E299S | +++ |
| 407/408 | D300R | ++ |
| 409/410 | D300L | ++ |
| 411/412 | I303K | ++ |
| 413/414 | D300A | ++ |
| 415/416 | I303R | ++ |
| 417/418 | D300S | ++ |
| 419/420 | D300F | ++ |
| 421/422 | D300I | ++ |
| 423/424 | D300Q | ++ |
| 425/426 | D300Y | + |
| 427/428 | D300N | + |
| 429/430 | E317L | + |
| 431/432 | S144A | + |
| 433/434 | E317Y | + |
| 435/436 | I303M | + |
| 437/438 | K374R | + |
| 439/440 | L63M | + |
| 441/442 | N301K | + |
| 443/444 | N134L | + |
| 445/446 | N301S | + |
| 447/448 | K60A | + |
| 449/450 | D300W | + |
| 451/452 | H65S | + |
| 453/454 | K68A | + |
| 455/456 | K60T | + |
| 457/458 | N301H | + |
| 459/460 | K60S | + |
| 461/462 | H65A | + |
| 463/464 | K55S | + |
| 465/466 | N301R/V308L | + |
| 467/468 | A110K | + |
| 469/470 | M139E | + |
| 471/472 | K68P | + |
| 473/474 | K55E | + |
| 475/476 | K55T | + |
| 477/478 | H65R | + |
| 479/480 | K55V | + |
| 481/482 | E64Q | + |
| 483/484 | T192V | + |
| 485/486 | L80M | + |
| 487/488 | K60P | + |
| 489/490 | H61K | + |
| 491/492 | N134Q | + |
| 493/494 | K55M | + |
| 495/496 | K68G | + |
| 497/498 | K55F | + |
| 499/500 | K55L | + |
| 501/502 | G249A | + |
| 503/504 | K68Q | + |
| 505/506 | N301M | + |
| 507/508 | E376R | + |
| 509/510 | M139L | + |
| 511/512 | E317T | + |

Levels of increased activity were determined relative to the reference polypeptide of SEQ ID NO: 254 and defined as follows: “+” 1.01 to 1.16, “++” > 1.16, “+++” > 1.36.

### Example 12

### Improvements over SEQ ID NO: 254 in Conversion of Nucleoside Monophosphates to Nucleotides

### HTP Screening for Improved AcK Variants

[0484] Acetate kinase of SEQ ID NO: 254 was selected as the parent adenylate kinase enzyme. Libraries of genes were produced from the parent gene using various techniques (e.g. saturation mutagenesis and recombination of previously identified beneficial mutations). The polypeptides encoded by each gene were produced in HTP and prepared as described in Table 12.1.

[0485] Reactions were performed as described in Example 4 using conditions summarized in Table 12.1. Data were collected using the HPLC assay described in Example 5.

TABLE 12.1
Reaction conditions
Lysis Buffer—TEoA (pH 7.5), 0.1 g/L lysozyme; Lysis
Conditions—100 μL, 75° C., 60 min; Reaction buffer—50 mM
Tris, 50 mM LiK(acetyl phosphate), 10 μM ATP, 10 mM magnesium
chloride, pH 8.0; Lysate concentration (vol %)—5; Reaction
Conditions—1 μL, 30° C., 1 hr; Nucleoside substrate—G;
Substrate Concentration—10 mM; Auxiliary Cascade Enzymes
(AdoK/AdyK)—SEQ ID NO: 576 (10 μM), SEQ ID NO: 586 (10 μM);
Dilution into Coupling Reaction—800X; Substrate
Oligonucleotides—SEQ ID NO: 593, SEQ ID NO: 594; Product
Oligonucleotides—SEQ ID NO: 597, SEQ ID NO: 598.

[0486] Activity relative to SEQ ID NO: 254 (Activity FIOP) was calculated based on the percentage of extension products observed for the variant compared with the percentage observed with SEQ ID NO: 254 (where the percent product may be set as the average of replicates or else the highest single sample as appropriate). The results are shown in Table 12.2.

TABLE 12.2
Acetate kinase activity relative to SEQ ID NO: 254

| | | FIOP Percent |
|---|---|---|
| SEQ ID NO: | Amino Acid Differences | Product Relative to |
| (nt/aa) | (Relative to SEQ ID NO: 254) | SEQ ID NO: 254 |
| 395/396 | E299V | +++ |
| 397/398 | E299F | ++ |
| 399/400 | E299L | +++ |
| 401/402 | E299T | +++ |
| 403/404 | E299M | +++ |
| 407/408 | D300R | +++ |
| 409/410 | D300L | ++ |
| 411/412 | I303K | ++ |
| 413/414 | D300A | ++ |
| 415/416 | I303R | ++ |
| 417/418 | D300S | ++ |
| 419/420 | D300F | ++ |
| 421/422 | D300I | + |
| 423/424 | D300Q | ++ |
| 425/426 | D300Y | + |
| 427/428 | D300N | +++ |
| 431/432 | S144A | + |
| 435/436 | I303M | + |
| 437/438 | K374R | + |
| 441/442 | N301K | + |
| 445/446 | N301S | + |
| 449/450 | D300W | + |
| 453/454 | K68A | ++ |
| 457/458 | N301H | + |
| 461/462 | H65A | ++ |
| 477/478 | H65R | + |
| 481/482 | E64Q | ++ |
| 483/484 | T192V | + |
| 485/486 | L80M | + |
| 487/488 | K60P | + |
| 489/490 | H61K | + |
| 491/492 | N134Q | + |
| 501/502 | G249A | ++ |
| 507/508 | E376R | ++ |
| 513/514 | N301R | ++ |
| 515/516 | S143G | ++ |
| 517/518 | N395A | + |
| 519/520 | V217M | + |
| 521/522 | E376S | + |
| 523/524 | L80S | + |
| 525/526 | M139R | + |
| 527/528 | V217L | + |
| 529/530 | E64L | + |
| 531/532 | E64R | + |
| 533/534 | E64K | + |
| 535/536 | M248G | + |
| 537/538 | E64V | + |
| 539/540 | M295L | + |
| 541/542 | Y285L | + |
| 543/544 | L74S | + |
| 545/546 | V62T | + |
| 547/548 | H65I | + |
| 549/550 | N395Q | + |
| 551/552 | L76G | + |
| 553/554 | D79E | + |
| 555/556 | L80I | + |
| 557/558 | L76S | + |
| 559/560 | D79K | + |
| 561/562 | T192C | + |
| 563/564 | H61S | + |
| 565/566 | E64A | + |

Levels of increased activity were determined relative to the reference polypeptide of SEQ ID NO: 254 and defined as follows: “+” 1.01 to 1.27, “++” > 1.27, “+++” > 1.56.

### Example 13

### Relative Activities of AcK Variants for the Conversion of Nucleosides to Nucleotides

### Shake Flask Characterization of AcK Variants

[0487] AcK variants SEQ ID NO: 4, SEQ ID NO: 254, and SEQ ID NO: 396 were expressed and purified as described in Example 3.

[0488] To assess activity, each variant was added to a 5 μL reaction at a final concentration of 10 μM. The reaction contained 50 mM Tris (pH 8.0), 50 mM LiK (acetyl phosphate), 10 μM ATP, 10 mM MgCl₂, 10 μM SEQ ID NO: 578, 10 μM SEQ ID NO: 588, and 10 mM nucleoside. Reactions were incubated in a Multitron (Infors) shaker at 30° C. and 400 rpm for 60 min. Reactions were then quenched and diluted 40-fold with 75% methanol and analyzed by HPLC as described in Example 5. Relative activities were normalized to the lowest observed activity by a variant on a given substrate. The results are shown in Table 13.1.

TABLE 13.1
Relative Activities of AK Variants on Nucleoside Substrates

| SEQ ID | | | | | | | | | |
|---|---|---|---|---|---|---|---|---|---|
| NO: | | | | | | | | | |
| (nt/aa) | A | C | G | U | fA | fC | fG | fU | mA |
| 3/4 | ~ | ~ | ~ | ~ | ~ | ~ | ~ | ~ | ~ |
| 253/254 | ~ | ~ | + | ~ | ~ | ++ | + | ++ | +++ |
| 395/396 | ~ | ~ | + | ~ | ~ | ++ | ++ | ++ | +++ |

Levels of relative activity were measured for the listed variants and defined as follows: “~” ≥ 1.0, “+” > 1.10, “++” > 1.60, “+++” > 2.00.

### Example 14

### Improvements Over SEQ ID NO: 396 in Conversion of Nucleoside Monophosphates to Nucleotides

### HTP Screening for Improved AcK Variants

[0489] Acetate kinase of SEQ ID NO: 396 was selected as the parent adenylate kinase enzyme. Libraries of genes were produced from the parent gene using various techniques (e.g. saturation mutagenesis and recombination of previously identified beneficial mutations). The polypeptides encoded by each gene were produced in HTP and prepared as described in Table 14.1.

[0490] Reactions were performed as described in Example 4 using conditions summarized in Table 14.1. Data were collected using the TdT-coupled reactions and CE assay described in Example 6.

TABLE 14.1
Reaction conditions
Lysis Buffer—TEoA (pH 7.5), 0.1 g/L lysozyme; Lysis
Conditions—100 μL, 50° C., 60 min; Reaction buffer—50 mM Tris,
50 mM LiK(acetylphosphate), 10 μM ATP, 10 mM magnesium chloride,
pH 8.0; Lysate concentration (vol %)—0.5; Reaction
Conditions—1 μL, 30° C., 1 hr; Nucleoside substrate—G;
Substrate Concentration—10 mM; Auxiliary Cascade Enzymes
(AdoK/AdyK)—SEQ ID NO: 600 (10 μM), SEQ ID NO: 606
(10 μM); Dilution into Coupling Reaction—800X; Substrate
Oligonucleotides—SEQ ID NO: 593, SEQ ID NO: 594; Product
Oligonucleotides—SEQ ID NO: 597, SEQ ID NO: 598.

[0491] Activity relative to SEQ ID NO: 396 (Activity FIOP) was calculated based on the percentage of extension products observed for the variant compared with the percentage observed with SEQ ID NO: 396 (where the percent product may be set as the average of replicates or else the highest single sample as appropriate). The results are shown in Table 14.2.

TABLE 14.2
Acetate kinase activity relative to SEQ ID NO: 396

| | | FIOP activity 1 |
|---|---|---|
| SEQ ID | Amino Acid Differences | relative to SEQ |
| NO: (nt/aa) | (Relative to SEQ ID NO: 396) | ID NO: 396 |
| 611/612 | K55S/I303R/V308L/V343F/G344L | +++ |
| 613/614 | T32S/K55S/G344L | +++ |
| 615/616 | K55S/I303R/V308L/G344L | +++ |
| 617/618 | M295I/I303R/V308L | ++ |
| 619/620 | K60G/D300L/N301K/E317Y | ++ |
| 621/622 | G344L | ++ |
| 623/624 | D300A/N301K/Y316M/E317Y/K374Q | ++ |
| 625/626 | K55S/G344L | + |
| 627/628 | K374C | + |
| 629/630 | M295I/V308L | + |
| 631/632 | D300L/N301K/E317Y | + |
| 633/634 | N301R/E317Y | + |
| 635/636 | K55E/I303R/V308L | + |
| 637/638 | D300A/N301R/K374Q | + |
| 639/640 | V308L | + |

Levels of increased activity were determined FIOP activity 1 relative to SEQ ID NO: 396 and are defined as follows: “+” > 1.08, “++” > 1.3, “+++” > 1.7.

### Example 15

### Improvements Over SEQ ID NO: 396 in Conversion of Nucleoside Monophosphates to Nucleotides

### HTP Screening for Improved AcK Variants

[0492] Acetate kinase of SEQ ID NO: 396 was selected as the parent adenylate kinase enzyme. Libraries of genes were produced from the parent gene using various techniques (e.g. saturation mutagenesis and recombination of previously identified beneficial mutations). The polypeptides encoded by each gene were produced in HTP and prepared as described in Table 15.1.

[0493] Reactions were performed as described in Example 4 using conditions summarized in Table 15.1. Data were collected using the TdT-coupled reactions and CE assay described in Example 6.

TABLE 15.1
Reaction conditions
Lysis Buffer—TEoA (pH 7.5), 0.1 g/L lysozyme; Lysis
Conditions—100 μL, 60° C., 60 min; Reaction buffer—50 mM Tris,
50 mM LiK(acetylphosphate), 10 μM ATP, 10 mM magnesium
chloride, pH 8.0; Lysate concentration (vol %)—5; Reaction
Conditions—1 μL, 30° C., 1 hr; Nucleoside substrate—mG;
Substrate Concentration—10 mM; Auxiliary Cascade Enzymes
(AdoK/AdyK)—SEQ ID NO: 602 (10 μM), SEQ ID NO: 608 (10 μM);
Dilution into Coupling Reaction—800X; Substrate
Oligonucleotides—SEQ ID NO: 593, SEQ ID NO: 594; Product
Oligonucleotides—SEQ ID NO: 871, SEQ ID NO: 872.

[0494] Activity relative to SEQ ID NO: 396 (Activity FIOP) was calculated based on the percentage of extension products observed for the variant compared with the percentage observed with SEQ ID NO: 396 (where the percent product may be set as the average of replicates or else the highest single sample as appropriate). The results are shown in Table 15.2.

TABLE 15.2
Acetate kinase activity relative to SEQ ID NO: 396

| | | FIOP activity 1 |
|---|---|---|
| SEQ ID NO: | Amino Acid Differences | relativet o SEQ |
| (nt/aa) | (Relative to SEQ ID NO: 396) | ID NO: 396 |
| 641/642 | E317R | +++ |
| 643/644 | T288I | +++ |
| 645/646 | I320W | +++ |
| 647/648 | I298T | +++ |
| 649/650 | A312G | +++ |
| 651/652 | E317W | +++ |
| 653/654 | T288N | +++ |
| 655/656 | E353V | +++ |
| 657/658 | P348S | ++ |
| 659/660 | G375T | ++ |
| 661/662 | E304W | ++ |
| 663/664 | T216L | ++ |
| 665/666 | V217P | ++ |
| 667/668 | V391G | ++ |
| 669/670 | S292T | ++ |
| 671/672 | Y285V | ++ |
| 673/674 | V225L | ++ |
| 675/676 | F373P | ++ |
| 677/678 | P348L | ++ |
| 679/680 | E353R | ++ |
| 681/682 | Y285P | ++ |
| 683/684 | D300W | ++ |
| 685/686 | S292Y | ++ |
| 687/688 | Y285R | ++ |
| 689/690 | E352Y | ++ |
| 691/692 | K374R | ++ |
| 693/694 | I354L | + |
| 695/696 | H133G | + |
| 697/698 | S293M | + |
| 699/700 | T288L | + |
| 701/702 | C309F | + |
| 703/704 | E317Q | + |
| 705/706 | H190Q | + |
| 707/708 | V391P | + |
| 709/710 | E304I | + |
| 711/712 | D300L | + |
| 713/714 | G375A | + |
| 715/716 | D314V | + |
| 717/718 | D314W | + |
| 719/720 | C309H | + |
| 721/722 | D297N | + |
| 723/724 | Y285Q | + |
| 725/726 | P393F | + |
| 727/728 | S292Q | + |
| 729/730 | V391Q | + |
| 731/732 | M350C | + |
| 733/734 | N301C | + |
| 735/736 | V225G | + |
| 737/738 | D372L | + |
| 739/740 | E317T | + |
| 741/742 | E317G | + |
| 743/744 | R310L | + |
| 745/746 | V299F | + |
| 747/748 | D300S | + |
| 749/750 | E304P | + |
| 751/752 | D372S | + |
| 753/754 | E317L | + |
| 755/756 | N301F | + |
| 757/758 | N301D | + |
| 759/760 | E352W | + |
| 761/762 | F291R | + |
| 763/764 | E317S | + |
| 765/766 | V284T | + |
| 767/768 | G375V | + |
| 769/770 | K374E | + |
| 771/772 | K374A | + |
| 773/774 | N301R | + |
| 775/776 | I354C | + |
| 777/778 | E317V | + |
| 779/780 | E352R | + |
| 781/782 | K374W | + |
| 783/784 | L313F | + |
| 785/786 | I354S | + |
| 787/788 | D372Y | + |
| 789/790 | T216S | + |
| 791/792 | M350L | + |
| 793/794 | I298L | + |
| 795/796 | D297P | + |
| 797/798 | F373T | + |
| 799/800 | N301H | + |
| 801/802 | V225H | + |

Levels of increased activity were determined FIOP activity 1 relative to SEQ ID NO: 396 and are defined as follows: “+” > 1.54, “++” > 2.0, “+++” > 2.35.

### Example 16

### Improvements Over SEQ ID NO: 620 in Conversion of Nucleoside Monophosphates to Nucleotides

### HTP Screening for Improved AcK Variants

[0495] Acetate kinase of SEQ ID NO: 620 was selected as the parent adenylate kinase enzyme. Libraries of genes were produced from the parent gene using various techniques (e.g. saturation mutagenesis and recombination of previously identified beneficial mutations). The polypeptides encoded by each gene were produced in HTP and prepared as described in Table 16.1.

[0496] Reactions were performed as described in Example 4 using conditions summarized in Table 16.1. Data were collected using the TdT-coupled reactions and CE assay described in Example 6.

TABLE 16.1
Reaction conditions
Lysis Buffer—TEoA (pH 7.5), 0.1 g/L lysozyme; Lysis
Conditions—100 μL, 50° C., 60 min; Reaction buffer—50 mM Tris,
50 mM LiK(acetylphosphate), 10 μM ATP, 10 mM magnesium
chloride, pH 8.0; Lysate concentration (vol %)—1; Reaction
Conditions—1 μL, 30° C., 1 hr; Nucleoside substrate—mU;
Substrate Concentration—10 mM; Auxiliary Cascade Enzymes
(AdoK/AdyK)—SEQ ID NO: 604 (10 μM), SEQ ID NO: 610 (10 μM);
Dilution into Coupling Reaction—800X; Substrate
Oligonucleotides—SEQ ID NO: 593, SEQ ID NO: 594; Product
Oligonucleotides—SEQ ID NO: 869, SEQ ID NO: 870.

[0497] Activity relative to SEQ ID NO: 620 (Activity FIOP) was calculated based on the percentage of extension products observed for the variant compared with the percentage observed with SEQ ID NO: 620 (where the percent product may be set as the average of replicates or else the highest single sample as appropriate). The results are shown in Table 16.2.

TABLE 16.2
Acetate kinase activity relative to SEQ ID NO: 620

| SEQ ID NO: | Amino Acid Differences | FIOP activity 1 relative |
|---|---|---|
| (nt/aa) | (Relative to SEQ ID NO: 620) | to SEQ ID NO: 620 |
| 803/804 | M350A | +++ |
| 805/806 | E376Y | +++ |
| 807/808 | P393S | +++ |
| 809/810 | D372P | ++ |
| 811/812 | N279L | ++ |
| 813/814 | L300Q | ++ |
| 815/816 | L300M | ++ |
| 817/818 | F291T | ++ |
| 819/820 | D314S | ++ |
| 821/822 | D372S | + |
| 823/824 | S10I | + |
| 825/826 | Y285Q | + |
| 827/828 | F373V | + |
| 829/830 | Y317W | + |
| 831/832 | M238Q | + |
| 833/834 | T216S | + |
| 835/836 | E304S | + |
| 837/838 | E304Q | + |

Levels of increased activity were determined FIOP activity 1 relative to SEQ ID NO: 620 and are defined as follows: “+” > 1.31, “++” > 1.45, “+++” > 1.6.

### Example 17

### Improvements Over SEQ ID NO: 620 in Conversion of Nucleoside Monophosphates to Nucleotides

### HTP Screening for Improved AcK Variants

[0498] Acetate kinase of SEQ ID NO: 620 was selected as the parent adenylate kinase enzyme. Libraries of genes were produced from the parent gene using various techniques (e.g. saturation mutagenesis and recombination of previously identified beneficial mutations). The polypeptides encoded by each gene were produced in HTP and prepared as described in Table 17.1.

[0499] Reactions were performed as described in Example 4 using conditions summarized in Table 17.1. Data were collected using the TdT-coupled reactions and CE assay described in Example 6.

TABLE 17.
Reaction conditions
Lysis Buffer—TEoA (pH 7.5), 0.1 g/L lysozyme; Lysis
Conditions—100 μL, 50° C., 60 min; Reaction buffer—50 mM
Tris, 50 mM LiK(acetylphosphate), 10 μM ATP, 10 mM magnesium
chloride, pH 8.0; Lysate concentration (vol %)—2; Reaction
Conditions—1 μL, 30° C., 1 hr; Nucleoside substrate—mG;
Substrate Concentration—10 mM; Auxiliary Cascade Enzymes
(AdoK/AdyK)—SEQ ID NO: 604 (10 μM), SEQ ID NO:
610 (10 μM); Dilution into Coupling Reaction—80X; Substrate
Oligonucleotides—SEQ ID NO: 593, SEQ ID NO: 594; Product
Oligonucleotides—SEQ ID NO: 871, SEQ ID NO: 872.

[0500] Activity relative to SEQ ID NO: 620 (Activity FIOP) was calculated based on the percentage of extension products observed for the variant compared with the percentage observed with SEQ ID NO: 620 (where the percent product may be set as the average of replicates or else the highest single sample as appropriate). The results are shown in Table 17.2.

TABLE 17.2
Acetate kinase activity relative to SEQ ID NO: 620

| SEQ ID NO: | Amino Acid Differences | FIOP activity 1 relative |
|---|---|---|
| (nt/aa) | (Relative to SEQ ID NO: 620) | to SEQ ID NO: 620 |
| 803/804 | M350A | ++ |
| 805/806 | E376Y | + |
| 809/810 | D372P | + |
| 815/816 | L300M | + |
| 817/818 | F291T | ++ |
| 823/824 | S10I | +++ |
| 825/826 | Y285Q | ++ |
| 831/832 | M238Q | +++ |
| 837/838 | E304Q | +++ |
| 839/840 | M350V | +++ |
| 841/842 | C309M | ++ |
| 843/844 | N279S | ++ |
| 845/846 | S293R | ++ |
| 847/848 | L246P | + |
| 849/850 | D314G | + |
| 851/852 | Q27G | + |
| 853/854 | V391R | + |
| 855/856 | Y317I | + |
| 857/858 | P393Q | + |
| 859/860 | Y196R | + |
| 861/862 | V299L | + |
| 863/864 | I349C | + |
| 865/866 | Y317F | + |
| 867/868 | C309P | + |

Levels of increased activity were determined FIOP activity 1 relative to SEQ ID NO: 620 and are defined as follows: “+” > 1.5, “++” > 2.0, “+++” > 2.23.

### Example 18

### Biosynthetic Cascade Reactions for Production of Nucleotide Triphosphates (NTPs) Using Pyruvate Oxidase (POx)

### NTP Biosynthetic Reaction Setup

[0501] Reactions were performed in 384-well format 40 μL BioRad PCR plates. AdoK variants were assayed in the presence of adenylate kinase (AdyK), acetate kinase (AcK), and pyruvate oxidase (POx) variants to enable direct conversion of nucleosides to the corresponding triphosphate using potassium phosphate and sodium pyruvate as POx substrates. These enzymes were added as either purified enzymes at a specific molarity or as g/L lyophilized lysate powder which was prepared by lyophilizing clarified shake flask lysate prepared as in Example 3. The reactions were set up as follows: (i) all reaction components, except for the nucleoside substrate, pyruvate, phosphate and the AdoK lysate, were premixed in a single solution and were aliquoted into each well of the 384-well plates, (ii) AdoK lysate solution was then added into the wells, and (iii) an aliquot of the substrate nucleoside in DMSO and with an aliquot of equimolar sodium pyruvate and potassium phosphate was added to initiate the reaction. The reaction plate was heat-sealed with a peelable aluminum seal and incubated in a thermocycler at the indicated temperature and reaction time, then held at 10° C. prior to analysis.

### Example 19

### Improvements Over SEQ ID NO: 620 in Conversion of Nucleoside Monophosphates to Nucleotides

### HTP Screening for Improved AcK Variants

[0502] SEQ ID NO: 620 was selected as the parent adenylate kinase enzyme. Libraries of genes were produced from the parent gene using various techniques (e.g., saturation mutagenesis and recombination of previously identified beneficial mutations). The polypeptides encoded by each gene were produced in HTP and prepared as described in Example 2.

[0503] Reactions were performed as described in Example 18 using conditions summarized in Table 19.1. Data were collected using the TdT-coupled reactions and CE assay described in Example 6.

TABLE 19.1
Reaction conditions
Lysis Buffer—TEoA (pH 7.5), 0.1 g/L lysozyme; Lysis
Conditions—100 μL, 50, 60 min; Reaction buffer—50 mM Tris,
50 mM sodium pyruvate, 50.0 mM dibasic potassium phosphate,
10 μM ATP, 10 mM magnesium chloride, pH 8;
Lysate concentration (vol %)—2.5; Reaction Conditions—1 μL,
30° C., 1 hr; Nucleoside substrate—fG; Substrate
Concentration—10 mM; Auxiliary Cascade Enzymes—SEQ ID NO: 874
(10 μM), SEQ ID NO: 876 (10 μM), SEQ ID NO: 878 (2 μM);
Dilution into Coupling Reaction—800X; Substrate
Oligonucleotides—SEQ ID NO: 593, SEQ ID NO: 594;
Product Oligonucleotides—SEQ ID NO: 1390, SEQ ID NO: 1391.

[0504] Activity relative to SEQ ID NO: 620 (Activity FIOP) was calculated based on the percentage of extension products observed for the variant compared with the percentage observed with SEQ ID NO: 620 (where the percent product may be set as the average of replicates or else the highest single sample as appropriate). The results are shown in Table 19.2.

TABLE 19.2
Acetate kinase activity relative to SEQ ID NO: 620

| | Amino Acid Differences | FIOP % yield |
|---|---|---|
| SEQ ID NO: | (Relative to | fGTP relative to |
| (nt/aa) | SEQ ID NO: 620) | SEQ ID NO: 620 |
| 807/808 | P393S | + |
| 811/812 | N279L | + |
| 823/824 | S10I | + |
| 827/828 | F373V | +++ |
| 839/840 | M350V | +++ |
| 845/846 | S293R | ++ |
| 849/850 | D314G | + |
| 851/852 | Q27G | ++ |
| 893/894 | R251D | +++ |
| 895/896 | P242V | ++ |
| 897/898 | P393L | ++ |
| 899/900 | N18A | ++ |
| 901/902 | V299I | + |
| 903/904 | Y316H | + |
| 905/906 | G344C | + |
| 907/908 | I400P | + |
| 909/910 | T340P | + |
| 911/912 | S347R | + |
| 913/914 | V217W | + |
| 915/916 | T394H | + |
| 917/918 | S22H | + |
| 919/920 | C309A | + |
| 921/922 | D372G | + |
| 923/924 | S347P | + |

Levels of increased activity were determined for FIOP % yield fGTP relative to SEQ ID NO: 620 and are defined as follows: “+” > 1.3, “++” > 1.5, “+++” > 1.7.

### Example 20

### Biosynthetic Cascade Reactions for Production of Nucleotide Triphosphates with 3′-Phosphate (3′P-NTPs)

### 3M's-NTP Biosynthetic Co-Incubation Reaction Setup

[0505] Reactions were performed in 384-well format 40 μL BioRad PCR plates. AcK variants were assayed in the presence of adenylyl-sulfate kinase (Cyc) and pyruvate oxidase (POx) variants to enable direct conversion of a mixture of NDP and NTPs to the corresponding 3M'S-NTPs. The reactions were set up as follows: (i) all reaction components, except for the POx, phosphate, pyruvate and the AcK lysate, were premixed in a single solution and were aliquoted into each well of the 384-well plates (ii) POx and pre-mixed phosphate/pyruvate solutions were added next into the wells, and (iii) AcK lysate solution was added finally into the wells. The reaction plate was heat-sealed with a peelable aluminum seal and incubated in a thermocycler at the indicated temperature and reaction time, then held at 10° C. prior to coupling to oligonucleotide substrates (SEQ ID: 593 containing 2% FAM-labeled substrate (SEQ ID NO: 594)) with Tent enzyme (SEQ ID NO: 884; reference Tent patent filing). Reactions were assayed on capillary electrophoresis instrument. All reactions are assayed in a co-incubation reaction setup unless otherwise mentioned.

### 3′P-NTP Biosynthetic Step-Wise Reaction Setup

[0506] Reactions were performed in 384-well format 40 μL BioRad PCR plates. AcK variants were assayed in the presence of adenylyl-sulfate kinase (CysC) and pyruvate oxidase (POx) variants to enable direct conversion of a mixture of NDP and NTPs to the corresponding 3′P-NTPs. The reactions were set up as follows: (i) all reaction components, except for the POx, phosphate, pyruvate and the AcK lysate, were premixed in a single solution, aliquoted into each well of the 384-well plates and incubated in a thermocycler at 30° C. for 16-18 h (ii) POx and pre-mixed phosphate/pyruvate solutions were added next into the wells, and (iii) AcK lysate solution was added finally into the wells. The reaction plate was heat-sealed with a peelable aluminum seal and incubated in a thermocycler at the indicated temperature and reaction time, then held at 10° C. prior to coupling to oligonucleotide substrates (SEQ ID NO: 593 containing 2% FAM-labeled substrate (SEQ ID NO: 594)) with Tent enzyme (SEQ ID NO: 884). Reactions were assayed on capillary electrophoresis instrument. All reactions are assayed in a co-incubation reaction setup unless otherwise mentioned.

### Example 21

### Analysis of 3′P-NTP Production in Biosynthetic Cascade Using Capillary Electrophoresis

### Coupling of 3′P-NTP Biosynthetic Reactions to Tent for CE:

[0507] For high-throughput (HTP) determination of 3′P-NTP yield, 3′P-NTP biosynthetic cascade reactions were terminated with either a heatkill at 95° C. for 2 min or by dilution with 75% methanol. Samples were then diluted into a coupling reaction. The reaction contained 20 mM triethanolamine (TEoA), 0.25 mM CoCl₂, 1 μM inorganic pyrophosphatase, 4 μM TnT enzyme (SEQ ID NO: 884), 12.375 μM unlabeled oligonucleotide (SEQ ID: 593) and 0.25 μM 5′-6-FAM-labeled oligonucleotide (SEQ ID: 594). Reactions were carried out at 50° C. for 30 min, followed by 2 min at 95° C.

### Sample Preparation for Reaction Analysis Using CE:

[0508] For analysis of reaction samples, capillary electrophoresis was performed using either an ABI 3500XL Genetic Analyzer (ThermoFisher) or a SeqStudio™ Flex Genetic Analyzer (ThermoFisher). Reactions (1 μL) were quenched by the additions of 19 μL of 1 mM aqueous ethylenediaminetetraacetic acid (EDTA). Quenched reactions were diluted to 1.25 nM oligonucleotide, and a 2 μL aliquot of this solutions was transferred to a new 96-well MicroAmp Optical PCR plate or a 384-well MicroAmp Optical PCR plate containing 18 μL Hi-Di™ Formamide (ThermoFisher) containing the Alexa633 size standard. The ABI 3500XL and SeqStudio™ Flex were configured with POP6 polymer, 50 cm capillaries, and a 55° C. oven temperature. Pre-run settings were 18 kV for 50 sec. Injection was 10 kV for 2 sec, and the run settings were 19 kV for 620-640 sec. FAM-labeled oligo substrates and products were identified by their sizes relative to the sizing ladder.

### Example 22

### Improvements Over SEQ ID NO: 620 in Conversion of NTPs to 3′P-NTPs

### HTP Screening for Improved AcK Variants

[0509] SEQ ID NO: 620 was selected as the parent acetate kinase enzyme. Libraries of genes were produced from the parent gene using various techniques (e.g., saturation mutagenesis and recombination of previously identified beneficial mutations). The polypeptides encoded by each gene were produced in HTP and prepared as described in Example 2.

[0510] Reactions were performed as described in Example 20 using conditions summarized in Table 22.1. Data were collected using the TdT-coupled reactions and CE assay described in Example 21.

TABLE 22.1
Reaction conditions

Lysis Buffer—TEoA (pH 7.5), 0.1 g/L lysozyme; Lysis Conditions—100 μL, 50° C., 60 min;
CysC/AcK Reaction buffer—50 mM Tris, 10 mM magnesium chloride, pH 8, 50 mM potassium
phosphate, 50 mM sodium pyruvate; Lysate concentration (vol %)—2; Reaction Conditions—1 μL,
30° C., 2 hr; Nucleoside substrate—fATP; Substrate Concentration—1 mM; Auxiliary CysC/AcK
reaction enzymes—2 g/L pyruvate oxidase (SEQ ID: 880), 10 μM CysC (SEQ ID: 892); Quench—heatkill
(95° C.); Dilution into TnT buffer—80×; TnT reaction buffer—20 mM TEoA, pH 7.8,
250 μM cobalt dichloride; Auxiliary TnT reaction components—4 μM TnT enzyme (SEQ ID: 884),
1 μM inorganic pyrophosphatase, 12.375 μM unlabeled oligonucleotide (SEQ ID: 593) and 0.25 μM
5′-6-FAM-labeled oligonucleotide (SEQ ID: 594); Reaction Conditions—1 μL, 50° C., 30 mins; TnT
Quench—heatkill (95° C.).

[0511] Activity relative to SEQ ID NO: 620 (Activity FIOP) was calculated based on the percentage of extension products observed for the variant compared with the percentage observed with SEQ ID NO: 620 (where the percent product may be set as the average of replicates or else the highest single sample as appropriate). The results are shown in Table 22.2.

TABLE 22.2
Acetate kinase activity relative to SEQ ID NO: 620

| | Amino Acid Differences | FIOP % yield 3P-fATP |
|---|---|---|
| SEQ ID NO: | (Relative to | relative to |
| (nt/aa) | SEQ ID NO: 620) | SEQ ID NO: 620 |
| 819/820 | D314S | + |
| 829/830 | Y317W | + |
| 845/846 | S293R | +++ |
| 939/940 | Y285R | +++ |
| 941/942 | F291P | ++ |
| 943/944 | F291S | ++ |
| 945/946 | D297L | ++ |
| 947/948 | F291N | ++ |
| 949/950 | L300R | ++ |
| 951/952 | F291G | ++ |
| 953/954 | N279W | + |
| 955/956 | E43A | + |
| 957/958 | V225I | + |
| 959/960 | T216G | + |
| 961/962 | E352M | + |
| 963/964 | A302C | + |
| 965/966 | C309R | + |
| 967/968 | S22R | + |
| 969/970 | S292A | + |
| 971/972 | F291W | + |
| 973/974 | E353I | + |
| 975/976 | F189M | + |
| 977/978 | G375Y | + |
| 979/980 | Y316R | + |

Levels of increased activity were determined for FIOP % yield 3P-fATP relative to SEQ ID NO: 620 and are defined as follows: “+” > 1.1, “++” > 2.0, “+++” > 3.0.

### Example 23

### Improvements Over SEQ ID NO: 846 in Conversion of NTPs to 3′P-NTPs

### HTP Screening for Improved AcK Variants

[0512] SEQ ID NO: 846 was selected as the parent AcK enzyme. Libraries of genes were produced from the parent gene using various techniques (e.g., saturation mutagenesis and recombination of previously identified beneficial mutations). The polypeptides encoded by each gene were produced in HTP and prepared as described in Example 2.

[0513] Reactions were performed as described in Example 20 using conditions summarized in Table 23.1. Data were collected using the CE assay described in Example 21.

TABLE 23.1
Reaction conditions

Lysis Buffer—TEoA (pH 7.5), 0.1 g/L lysozyme; Lysis Conditions—100 μL, 50° C., 60 min;
CysC/AcK Reaction buffer—50 mM Tris, 10 mM magnesium chloride, pH 8, 50 mM potassium
phosphate, 50 mM sodium pyruvate; Lysate concentration (vol %)—2; Reaction Conditions—1 μL,
30° C., 2 hr; Nucleoside substrate—fATP; Substrate Concentration—1 mM; Auxiliary CysC/AcK
reaction enzymes—2 g/L pyruvate oxidase (SEQ ID: 880), 10 μM CysC (SEQ ID: 892); Quench—heatkill
(95° C.); Dilution into TnT buffer—80×; TnT reaction buffer—20 mM TEoA, pH 7.8,
250 μM cobalt dichloride; Auxiliary TnT reaction components—4 μM TnT enzyme (SEQ ID: 884),
1 μM inorganic pyrophosphatase, 12.375 μM unlabeled oligonucleotide (SEQ ID: 593) and 0.25 μM
5′-6-FAM-labeled oligonucleotide (SEQ ID: 594); Reaction Conditions—1 μL, 50° C., 30 mins; TnT
Quench—heatkill (95° C.).

[0514] Activity relative to SEQ ID NO: 846 (Activity FIOP) was calculated based on the percentage of extension products observed for the variant compared with the percentage observed with SEQ ID NO: 846 (where the percent product may be set as the average of replicates or else the highest single sample as appropriate). The results are shown in Table 23.2.

TABLE 23.2
acetate kinase activity relative to SEQ ID NO: 846

| SEQ ID NO: | Amino Acid Differences | FIOP activity relative |
|---|---|---|
| (nt/aa) | (Relative to SEQ ID NO: 846) | to SEQ ID NO: 846 |
| 981/982 | S19L | +++ |
| 983/984 | S385E | +++ |
| 985/986 | G231P | +++ |
| 987/988 | Y209K | ++ |
| 989/990 | M31F | ++ |
| 991/992 | A370L | ++ |
| 993/994 | K183L | ++ |
| 995/996 | A258Y | ++ |
| 997/998 | V14E | ++ |
| 999/1000 | L212T | ++ |
| 1001/1002 | I355P | ++ |
| 1003/1004 | H54L | ++ |
| 1005/1006 | F240G | ++ |
| 1007/1008 | Y323P | ++ |
| 1009/1010 | E356S | ++ |
| 1011/1012 | Y182R | ++ |
| 1013/1014 | L263C | + |
| 1015/1016 | E266R | + |
| 1017/1018 | V119L | + |
| 1019/1020 | K114V | + |
| 1021/1022 | E118H | + |
| 1023/1024 | Q211V | + |
| 1025/1026 | Y358G | + |
| 1027/1028 | K114T | + |
| 1029/1030 | H54P | + |
| 1031/1032 | K121G | + |
| 1033/1034 | I277S | + |
| 1035/1036 | K265L | + |
| 1037/1038 | D306R | + |
| 1039/1040 | Y318P | + |
| 1041/1042 | L28W | + |
| 1043/1044 | P257W | + |
| 1045/1046 | L269V | + |
| 1047/1048 | K114S | + |
| 1049/1050 | V315I | + |
| 1051/1052 | A38R | + |
| 1053/1054 | K114Q/V119M/I123V | + |
| 1055/1056 | S385V | + |
| 1057/1058 | M205R | + |

Levels of increased activity were determined for FIOP activity relative to SEQ ID NO: 846 and are defined as follows: “+” > 1.1, “++” > 1.6, “+++” > 2.5.

### Example 24

### Improvements Over SEQ ID NO: 846 in Conversion of NTPs to 3′P-NTPs

### HTP Screening for Improved AcK Variants

[0515] SEQ ID NO: 846 was selected as the parent AcK enzyme. Libraries of genes were produced from the parent gene using various techniques (e.g. saturation mutagenesis and recombination of previously identified beneficial mutations). The polypeptides encoded by each gene were produced in HTP and prepared as described in Example 2.

[0516] Reactions were performed as described in Example 20 using conditions summarized in Table 24.1. Data were collected using the CE assay described in Example 21.

TABLE 24.1
Reaction conditions

Lysis Buffer—TEoA (pH 7.5), 0.1 g/L lysozyme; Lysis Conditions—100 μL, 62° C., 60 min;
CysC/AcK Reaction buffer—50 mM Tris, 10 mM magnesium chloride, pH 8, 50 mM potassium
phosphate, 50 mM sodium pyruvate; Lysate concentration (vol %)—2; Reaction Conditions—1 μL,
30° C., 2 hr; Nucleoside substrate—fATP; Substrate Concentration—1 mM; Auxiliary CysC/AcK
reaction enzymes—2 g/L pyruvate oxidase (SEQ ID: 880), 10 μM CysC (SEQ ID: 892); Quench—heatkill
(95° C.); Dilution into TnT buffer—80×; TnT reaction buffer—20 mM TEoA, pH 7.8,
250 μM cobalt dichloride; Auxiliary TnT reaction components—4 μM TnT enzyme (SEQ ID: 884),
1 μM inorganic pyrophosphatase, 12.375 μM unlabeled oligonucleotide (SEQ ID: 593) and 0.25 μM
5′-6-FAM-labeled oligonucleotide (SEQ ID: 594); Reaction Conditions—1 μL, 50° C., 30 mins; TnT
Quench—heatkill (95° C.).

[0517] Stability relative to SEQ ID NO: 846 (Stability FIOP) was calculated based on the percentage of extension products observed for the variant compared with the percentage observed with SEQ ID NO: 846 (where the percent product may be set as the average of replicates or else the highest single sample as appropriate). The results are shown in Table 24.2.

TABLE 24.2
Acetate kinase activity relative to SEQ ID NO: 846

| SEQ ID NO: | Amino Acid Differences | FIOP stability relative |
|---|---|---|
| (nt/aa) | (Relative to SEQ ID NO: 846) | to SEQ ID NO: 846 |
| 1059/1060 | A38L | +++ |
| 1061/1062 | S19Q | +++ |
| 1063/1064 | M31R | +++ |
| 1065/1066 | V88P | +++ |
| 1067/1068 | S19P | +++ |
| 1069/1070 | V14M | +++ |
| 1071/1072 | A38Y | ++ |
| 1073/1074 | V88N | ++ |
| 1075/1076 | P152I | ++ |
| 1077/1078 | D210E | ++ |
| 1079/1080 | D384K | ++ |
| 1081/1082 | E273T | ++ |
| 1083/1084 | A38M | ++ |
| 1085/1086 | M31W | ++ |
| 1087/1088 | D210V | ++ |
| 1089/1090 | M31E | ++ |
| 1091/1092 | E180T | ++ |
| 1093/1094 | L212Y | ++ |
| 1095/1096 | A201W | ++ |
| 1097/1098 | K402E | ++ |
| 1099/1100 | K207D | ++ |
| 1101/1102 | S127L | ++ |
| 1103/1104 | K199L | ++ |
| 1105/1106 | D210W | ++ |
| 1107/1108 | Y209L | ++ |
| 1109/1110 | V14S | + |
| 1111/1112 | E266I | + |
| 1113/1114 | F128W | + |
| 1115/1116 | A329V | + |
| 1117/1118 | E118P | + |
| 1119/1120 | D91L | + |
| 1121/1122 | G87R | + |
| 1123/1124 | E264V | + |
| 1125/1126 | V113M/K229S | + |
| 1127/1128 | D30S | + |
| 1129/1130 | E261R | + |
| 1131/1132 | L398Y | + |
| 1133/1134 | K405D | + |
| 1135/1136 | G363A | + |
| 1137/1138 | I324L | + |
| 1139/1140 | I204P | + |
| 1141/1142 | A370M | + |
| 1143/1144 | E409A | + |
| 1145/1146 | K213S | + |
| 1147/1148 | H54V | + |
| 1149/1150 | A227S | + |
| 1151/1152 | Y361P | + |
| 1153/1154 | K114L | + |
| 1155/1156 | K207T | + |
| 1157/1158 | K229T | + |
| 1159/1160 | P383R | + |
| 1161/1162 | Y209R | + |
| 1163/1164 | T32A/V88L | + |
| 1165/1166 | P149C | + |
| 1167/1168 | V36A | + |
| 1169/1170 | K207L | + |
| 1171/1172 | V88L/V387T | + |
| 1173/1174 | G360R | + |
| 1175/1176 | K183N | + |
| 1177/1178 | G150T | + |
| 1179/1180 | S270T | + |
| 1181/1182 | E273S | + |
| 1183/1184 | E180R | + |
| 1185/1186 | D210P | + |
| 1187/1188 | G49A/H54A | + |
| 1189/1190 | Y176V | + |
| 1191/1192 | E406L | + |
| 1193/1194 | V260F | + |
| 1195/1196 | E406I | + |
| 1197/1198 | E167G | + |
| 1199/1200 | Q211M | + |
| 1201/1202 | A201Q | + |
| 1203/1204 | K229S | + |
| 1205/1206 | K229L | + |
| 1207/1208 | G268Q | + |
| 1209/1210 | I364L | + |
| 1211/1212 | A370T | + |
| 1213/1214 | E273H | + |
| 1215/1216 | S19G | + |
| 1217/1218 | M390G | + |
| 1219/1220 | P257V | + |
| 1221/1222 | G363V | + |
| 1223/1224 | E266Y | + |
| 1225/1226 | K402M | + |
| 1227/1228 | D117M | + |
| 1229/1230 | A38F | + |
| 1231/1232 | E261S | + |
| 1233/1234 | K13S | + |
| 1235/1236 | A370H | + |
| 1237/1238 | T116M | + |

Levels of increased activity were determined for FIOP activity relative to SEQ ID NO: 846 and are defined as follows: “+” > 1.1, “++” > 1.4, “+++” > 2.0.

### Example 25

### Improvements Over SEQ ID NO: 1240 in Conversion of NTPs to 3′P-NTPs

### HTP Screening for Improved AcK Variants

[0518] SEQ ID NO: 1240 was selected as the parent AcK enzyme. Libraries of genes were produced from the parent gene using various techniques (e.g., saturation mutagenesis and recombination of previously identified beneficial mutations). The polypeptides encoded by each gene were produced in HTP and prepared as described in Example 2.

[0519] Reactions were performed as described in Example 20 using conditions summarized in Table 25.1. Data were collected using the CE assay described in Example 21.

TABLE 25.1
Reaction conditions

Lysis Buffer—TEoA (pH 7.5), 0.1 g/L lysozyme; Lysis Conditions—100 μL, 50° C., 60 min;
CysC/AcK Reaction buffer—50 mM Tris, 10 mM magnesium chloride, pH 8, 50 mM potassium
phosphate, 50 mM sodium pyruvate; Lysate concentration (vol %)—2; Reaction Conditions—1 μL,
30° C., 2 hr; Nucleoside substrate—fATP; Substrate Concentration—1 mM; Auxiliary CysC/AcK
reaction enzymes—2 g/L pyruvate oxidase (SEQ ID: 880), 10 μM CysC (SEQ ID: 890); Quench—heatkill
(95° C.); Dilution into TnT buffer—80×; TnT reaction buffer—20 mM TEoA, pH 7.8,
250 μM cobalt dichloride; Auxiliary TnT reaction components—4 μM TnT enzyme (SEQ ID: 884),
1 μM inorganic pyrophosphatase, 12.375 μM unlabeled oligonucleotide (SEQ ID: 593) and 0.25 μM
5′-6-FAM-labeled oligonucleotide (SEQ ID: 594); Reaction Conditions—1 μL, 50° C., 30 mins;
TnT Quench—heatkill (95° C.)

[0520] Activity relative to SEQ ID NO: 1240 (Activity FIOP) was calculated based on the percentage of extension products observed for the variant compared with the percentage observed with SEQ ID NO: 1240 (where the percent product may be set as the average of replicates or else the highest single sample as appropriate). The results are shown in Table 25.2.

TABLE 25.2
Acetate kinase activity relative to SEQ ID NO: 1240

| | | FIOP activity |
|---|---|---|
| SEQ ID NO: | Amino Acid Differences | relative to |
| (nt/aa) | (Relative to SEQ ID NO: 1240) | SEQ ID NO: 1240 |
| 1241/1242 | S19Q/S22R/Y285R/L300R | ++ |
| 1243/1244 | Y285R/D297L/L398Y | ++ |
| 1245/1246 | S127L/K183N/D297L | ++ |
| 1247/1248 | S19L/S127L/L300R | ++ |
| 1249/1250 | T32R/H54L/V88P/Y209L/I277A | + |
| 1251/1252 | I277A/F291P | + |
| 1253/1254 | S127L/K183N/L300R/L398Y | + |
| 1255/1256 | S19Q/S22R/L398Y | + |
| 1257/1258 | T32R/H54L/Y209R/I277A | + |
| 1259/1260 | L398Y | + |
| 1261/1262 | V16S/L28I/H54L | + |
| 1263/1264 | V88P/Y209L/I277A | + |
| 1265/1266 | S127L/D297L | + |
| 1267/1268 | V14M/T32R/F291P | + |
| 1269/1270 | S19L/S127L/K183N/D297L/ | + |
| | L300R/L398Y | |
| 1271/1272 | V16S/V88P | + |
| 1273/1274 | H54L/I277A | + |
| 1275/1276 | T32R | + |
| 1277/1278 | V16S | + |
| 1279/1280 | T32R/H54L/Y209L | + |
| 1281/1282 | S22R/K183N/D297L/L398Y | + |
| 1283/1284 | V88N | + |
| 1285/1286 | V14M/Y209R | + |
| 1287/1288 | V16S/T32R/H54L/Y209R/I277A | + |
| 1289/1290 | S19Q/S127L/S292G/L300R/L398Y | + |
| 1291/1292 | H54L/F291P | + |
| 1293/1294 | H54L/V88N/I277A | + |
| 1295/1296 | T32R/H54L/V88N/F291P | + |
| 1297/1298 | Y209R | + |
| 1299/1300 | H54L/Y209L | + |
| 1301/1302 | Y209R/F291P | + |
| 1303/1304 | S19Q/S127L | + |
| 1305/1306 | F291P | + |
| 1307/1308 | V88P/I277A | + |
| 1309/1310 | V88P | + |
| 1311/1312 | T32R/Y209L | + |
| 1313/1314 | S127L/Y285R | + |
| 1315/1316 | T32R/V88N/Y209L | + |
| 1317/1318 | V14M/H54L/F291P | + |
| 1319/1320 | V14M/V88P | + |
| 1321/1322 | Y285R/L300R | + |
| 1323/1324 | S127L/Y285R/D297L | + |
| 1325/1326 | Y209L/F291P | + |
| 1327/1328 | V16S/H54L/I277A | + |
| 1329/1330 | V88N/Y209R/A223T | + |
| 1331/1332 | H4Y | + |
| 1333/1334 | T32R/V88P/I277A | + |
| 1335/1336 | S127L/D297L/L398Y | + |
| 1337/1338 | T32R/Y209R/F291P | + |
| 1339/1340 | T32R/V88P | + |
| 1341/1342 | S22R/A38L/S127L/L300R | + |
| 1343/1344 | A38F/S127L/D297L | + |
| 1345/1346 | Y285R/D297L | + |

Levels of increased activity were determined for FIOP activity relative to SEQ ID NO: 1240 and are defined as follows: “+” > 1.1, “++” > 1.6.

### Example 26

### Improvements Over SEQ ID NO: 1250 in Conversion of NTPs to 3′P-NTPs

### HTP Screening for Improved AcK Variants

[0521] SEQ ID NO: 1250 was selected as the parent AcK enzyme. Libraries of genes were produced from the parent gene using various techniques (e.g., saturation mutagenesis and recombination of previously identified beneficial mutations). The polypeptides encoded by each gene were produced in HTP and prepared as described in Example 2.

[0522] Reactions were performed as described in Example 20 using conditions summarized in Table 26.1. Data were collected using the CE assay described in Example 21.

TABLE 26.1
Reaction conditions

Lysis Buffer—TEoA (pH 7.5), 0.1 g/L lysozyme; Lysis Conditions—100 μL, 50° C., 60 min;
CysC/AcK Reaction buffer—50 mM Tris, 10 mM magnesium chloride, pH 8, 50 mM potassium
phosphate, 50 mM sodium pyruvate; Lysate concentration (vol %)—2; Reaction Conditions—1 μL,
30° C., 2 hr; Nucleoside substrate—fATP; Substrate Concentration—1 mM; Auxiliary CysC/AcK
reaction enzymes—2 g/L pyruvate oxidase (SEQ ID: 882), 10 μM CysC (SEQ ID: 892); Quench—heatkill
(95° C.); Dilution into TnT buffer—80×; TnT reaction buffer—20 mM TEoA, pH 7.8,
250 μM cobalt dichloride; Auxiliary TnT reaction components—4 μM TnT enzyme (SEQ ID: 884),
1 μM inorganic pyrophosphatase, 12.375 μM unlabeled oligonucleotide (SEQ ID: 593) and 0.25 μM
5′-6-FAM-labeled oligonucleotide (SEQ ID: 594); Reaction Conditions—1 μL, 50° C., 30 mins; TnT
Quench—heatkill (95° C.).

[0523] Activity relative to SEQ ID NO: 1250 (Activity FIOP) was calculated based on the percentage of extension products observed for the variant compared with the percentage observed with SEQ ID NO: 1250 (where the percent product may be set as the average of replicates or else the highest single sample as appropriate). The results are shown in Table 26.2.

TABLE 26.2
Acetate kinase activity relative to SEQ ID NO: 1250

| SEQ ID NO: | Amino Acid Differences | FIOP activity relative |
|---|---|---|
| (nt/aa) | (Relative to SEQ ID NO: 1250) | to SEQ ID NO: 1250 |
| 1347/1348 | M165A | ++ |
| 1349/1350 | E345N | ++ |
| 1351/1352 | Q163R | + |
| 1353/1354 | I320G | + |
| 1355/1356 | S347G | + |
| 1357/1358 | Y316E | + |
| 1359/1360 | E107L | + |

Levels of increased activity were determined for FIOP activity relative to SEQ ID NO: 1250 and are defined as follows: “+” > 1.05, “++” > 1.12.

### Example 27

### Improvements Over SEQ ID NO: 1250 in Conversion of NTPs to 3′P-NTPs

### HTP Screening for Improved AcK Variants

[0524] SEQ ID NO: 1250 was selected as the parent AcK enzyme. Libraries of genes were produced from the parent gene using various techniques (e.g., saturation mutagenesis and recombination of previously identified beneficial mutations). The polypeptides encoded by each gene were produced in HTP and prepared as described in Example 2.

[0525] Reactions were performed as described in Example 20 using conditions summarized in Table 27.1. Data were collected using the CE assay described in Example 21.

TABLE 27.1
Step-wise Reaction conditions

Lysis Buffer—TEoA (pH 7.5), 0.1 g/L lysozyme; Lysis Conditions—100 μL, 50° C., 60 min;
CysC/AcK Reaction buffer—50 mM Tris, 10 mM magnesium chloride, pH 8, 50 mM potassium
phosphate, 50 mM sodium pyruvate; Lysate concentration (vol %)—10; Reaction Conditions—1 μL,
30° C., 3 hr; Nucleoside substrate—3′P-ADP; Substrate Concentration—1 mM; Auxiliary CysC/AcK
reaction enzymes—2 g/L pyruvate oxidase (SEQ ID: 882), 10 μM CysC (SEQ ID: 892); Quench—heatkill
(95° C.); Dilution into TnT buffer—80×; TnT reaction buffer—20 mM TEoA, pH 7.8,
250 μM cobalt dichloride; Auxiliary TnT reaction components—4 μM TnT enzyme (SEQ ID: 884),
1 μM inorganic pyrophosphatase, 12.375 μM unlabeled oligonucleotide (SEQ ID: 593) and 0.25 μM
5′-6-FAM-labeled oligonucleotide (SEQ ID: 594); Reaction Conditions—1 μL, 50° C., 30 mins; TnT
Quench—heatkill (95° C.).

[0526] Activity relative to SEQ ID NO: 1250 (Activity FIOP) was calculated based on the percentage of extension products observed for the variant compared with the percentage observed with SEQ ID NO: 1250 (where the percent product may be set as the average of replicates or else the highest single sample as appropriate). The results are shown in Table 27.2.

TABLE 27.2
Acetate kinase activity relative to SEQ ID NO: 1250

| | | FIOP % yield 3P-fATP |
|---|---|---|
| SEQ ID NO: | Amino Acid Differences | relative to |
| (nt/aa) | (Relative to SEQ ID NO: 620) | SEQ ID NO: 620 |
| 1361/1362 | P348H | ++ |
| 1363/1364 | L311V | + |
| 1365/1366 | F339V | + |
| 1367/1368 | Y317A | + |
| 1369/1370 | S22Y | + |
| 1371/1372 | V151A | + |
| 1373/1374 | I138V | + |
| 1375/1376 | I407M | + |
| 1377/1378 | I407L | + |
| 1379/1380 | A223G | + |
| 1381/1382 | V391P | + |
| 1383/1384 | P393H | + |
| 1385/1386 | I407R | + |

Levels of increased activity were determined for FIOP activity 1 relative to SEQ ID NO: 1250 and are defined as follows: “+” > 1.09, “++” > 1.2.

### Example 28

### Improvements Over SEQ ID NO: 620 in Conversion of NTPs to 3′P-NTPs

### Shake-Flask Characterization for Improved AcK Variants

[0527] SEQ ID NO: 620 was selected as the parent AcK enzyme. Libraries of genes were produced from the parent gene using various techniques (e.g., saturation mutagenesis and recombination of previously identified beneficial mutations). The polypeptides encoded by each gene were produced in shake-flask cultures and prepared as described in Example 3.

[0528] Reactions were performed as described in Example 20 using conditions summarized in Table 28.1. Data were collected using the CE assay described in Example 21.

TABLE 28.1
Reaction conditions

AcK Reaction buffer—50 mM Tris, 10 mM magnesium chloride, pH 8, 50 mM potassium
phosphate, 50 mM sodium pyruvate; Enzyme concentration (μM)—0.02; Reaction Conditions—5 μL,
30° C., 1 hr; Nucleoside substrate—3′P-ADP; Substrate Concentration—1 mM; Auxiliary AcK
reaction enzymes—2 μM pyruvate oxidase (SEQ ID: 882), 0.1 g/L catalase; Quench—ax dilution
with methanol; Dilution into TnT buffer—80×; TnT reaction buffer—20 mM TEoA, pH 7.8,
250 μM cobalt dichloride; Auxiliary TnT reaction components—4 μM TnT enzyme (SEQ ID: 884),
1 μM inorganic pyrophosphatase, 12.375 μM unlabeled oligonucleotide (SEQ ID: 593) and 0.25 μM
5′-6-FAM-labeled oligonucleotide (SEQ ID: 594); Reaction Conditions—1 μL, 50° C., 30 mins; TnT
Quench—heatkill (95° C.)

[0529] Activity relative to SEQ ID NO: 620 (Activity FIOP) was calculated based on the percentage of extension products observed for the variant compared with the percentage observed with SEQ ID NO: 620 (where the percent product may be set as the average of replicates or else the highest single sample as appropriate). The results are shown in Table 28.2.

TABLE 28.2
Acetate kinase activity relative to SEQ ID NO: 620

| | | FIOP activity |
|---|---|---|
| SEQ ID NO: | Amino Acid Differences | relative to |
| (nt/aa) | (Relative to SEQ ID NO: 620) | SEQ ID NO: 620 |
| 845/846 | S293R | ++ |
| 1239/1240 | N279W/S293R | +++ |
| 1249/1250 | T32R/H54L/V88P/Y209L/ | ++++ |
| | I277A/N279W/S293R | |
| 1387/1388 | T32R/A38L/H54L/V88P/Y209L/ | ++++ |
| | I277A/N279W/S293R | |
| 1389/1390 | V16S/T32R/A38L/H54L/V88P/ | +++ |
| | Y209L/I277A/N279W/S293R | |

Levels of increased activity were determined for FIOP activity relative to SEQ ID NO: 620 and are defined as follows: “+” > 1.0, “++” > 15.0, “+++” > 25.0, “++++” > 100.0.

[0530] While the invention has been described with reference to the specific embodiments, various changes can be made and equivalents can be substituted to adapt to a particular situation, material, composition of matter, process, process step or steps, without departing from the spirit and scope of the invention.

[0531] For all purposes, each and every publication and patent document cited in this disclosure is incorporated herein by reference as if each such publication or document was specifically and individually indicated to be incorporated herein by reference. Citation of publications and patent documents is not intended as an indication that any such document is pertinent prior art, nor does it constitute an admission as to its contents or date.

What is claimed is:

1. An engineered acetate kinase comprising an amino acid sequence having at least 70%, 75%, 80%, 81%, 82%, 83%, 84%, 85%, 86%, 87%, 88%, 89%, 90%, 91%, 92%, 93%, 94%, 95%, 96%, 97%, 98%, 99%, or more sequence identity to a reference sequence corresponding to amino acid residues 12-417 of an even-numbered SEQ ID NO. of SEQ ID NOs: 4, 14-566, 612-868, 894-924, and 940-1390, or to a reference sequence corresponding to an even-numbered SEQ ID NO. of SEQ ID NOs: 4, 14-566, 612-868, 894-924, and 940-1390, wherein the amino acid sequence comprises one or more substitutions relative to the reference sequence corresponding to amino acid residues 12-417 of SEQ ID NO: 4, 254, 396, 620, 846, 1240, or 1250, or relative to the reference sequence corresponding to SEQ ID NO: 4, 254, 396, 620, 846, 1240, or 1250.

2. The engineered acetate kinase of claim 1, comprising an amino acid sequence having at least 70%, 75%, 80%, 81%, 82%, 83%, 84%, 85%, 86%, 87%, 88%, 89%, 90%, 91%, 92%, 93%, 94%, 95%, 96%, 97%, 98%, 99%, or more sequence identity to a reference sequence corresponding to amino acid residues 12-417 of SEQ ID NO: 4, 254, 396, 620, 846, 1240, or 1250, or to a reference sequence corresponding to SEQ ID NO: 4, 254, 396, 620, 846, 1240, or 1250, wherein the amino acid sequence comprises one or more substitutions relative to the reference sequence corresponding to amino acid residues 12-417 of SEQ ID NO: 4, 254, 396, 620, 846, 1240, or 1250, or relative to the reference sequence corresponding to SEQ ID NO: 4, 254, 396, 620, 846, 1240, or 1250.

3. The engineered acetate kinase of claim 1, comprising an amino acid sequence having at least 70%, 75%, 80%, 81%, 82%, 83%, 84%, 85%, 86%, 87%, 88%, 89%, 90%, 91%, 92%, 93%, 94%, 95%, 96%, 97%, 98%, 99%, or more sequence identity to the reference sequence corresponding to amino acid residues 12-417 of SEQ ID NO: 4, or to the reference sequence corresponding to SEQ ID NO: 4, wherein the amino acid sequence comprises one or more substitutions relative to the reference sequence corresponding to amino acid residues 12-417 of SEQ ID NO: 4, or relative to the reference sequence corresponding to SEQ ID NO: 4.

4. The engineered acetate kinase of claim 1, comprising an amino acid sequence having at least 70%, 75%, 80%, 81%, 82%, 83%, 84%, 85%, 86%, 87%, 88%, 89%, 90%, 91%, 92%, 93%, 94%, 95%, 96%, 97%, 98%, 99%, or more sequence identity to the reference sequence corresponding to amino acid residues 12-417 of SEQ ID NO: 254, 396, 620, 846, 1240, or 1250, or to the reference sequence corresponding to SEQ ID NO: 254, 396, 620, 846, 1240, or 1250, wherein the amino acid sequence comprises one or more substitutions relative to the reference sequence corresponding to amino acid residues 12-417 of SEQ ID NO: 4, or relative to the reference sequence corresponding to SEQ ID NO: 4.

5. The engineered acetate kinase of claim 1, comprising an amino acid sequence having at least 70%, 75%, 80%, 81%, 82%, 83%, 84%, 85%, 86%, 87%, 88%, 89%, 90%, 91%, 92%, 93%, 94%, 95%, 96%, 97%, 98%, 99%, or more sequence identity to a reference sequence corresponding to amino acid residues 12-417 of an even-numbered SEQ ID NO. of SEQ ID NOs: 14-566, 612-868, 894-924, and 940-1390, or to a reference sequence corresponding to an even-numbered SEQ ID NO. of SEQ ID NOs: 14-566, 612-868, 894-924, and 940-1390, wherein the amino acid sequence comprises one or more substitutions relative to the reference sequence corresponding to amino acid residues 12-417 of SEQ ID NO: 4, or relative to the reference sequence corresponding to SEQ ID NO: 4.

6. The engineered acetate kinase of any one of claims 1-5, wherein the amino acid sequence of the engineered acetate kinase comprises at least a substitution at amino acid position 4, 5, 10, 11, 13, 14, 15, 16, 18, 19, 22, 26, 27, 28, 30, 31, 32, 36, 38, 41, 43, 46, 49, 50, 52, 54, 55, 60, 61, 62, 63, 64, 65, 66, 68, 69, 72, 74, 75, 76, 77, 79, 80, 87, 88, 91, 97, 98, 107, 113, 114, 110, 115, 116, 117, 118, 119, 120, 121, 123, 126, 127, 128, 130, 133, 134, 135, 136, 137, 138, 139, 141, 142, 143, 144, 145, 146, 147, 148, 149, 150, 151, 152, 156, 157, 160, 163, 165, 167, 170, 176, 180, 182, 183, 189, 190, 192, 196, 199, 201, 204, 205, 207, 208, 209, 210, 211, 212, 213, 216, 217, 223, 225, 227, 229, 231, 238, 240, 242, 246, 248, 249, 251, 257, 258, 260, 261, 263, 264, 265, 266, 268, 269, 270, 273, 276, 277, 279, 280, 284, 285, 288, 291, 292, 293, 295, 297, 298, 299, 300, 301, 302, 303, 304, 306, 308, 309, 310, 311, 312, 313, 314, 315, 316, 317, 318, 320, 323, 324, 329, 339, 340, 343, 344, 345, 347, 348, 349, 350, 352, 353, 354, 355, 356, 358, 360, 361, 363, 364, 369, 370, 372, 373, 374, 375, 376, 383, 384, 385, 387, 390, 391, 392, 393, 394, 395, 398, 400, 402, 404, 405, 406, 407, 408, or 409, or combinations thereof, wherein the amino acid positions are relative to the reference sequence corresponding to amino acid residues 12-417 of SEQ ID NO: 4, or relative to the reference sequence corresponding to SEQ ID NO: 4.

7. The engineered acetate kinase of any one of claims 1-6, wherein the amino acid sequence of the engineered acetate kinase comprises at least a substitution or amino acid residue 4Y, 5N, 10I, 11D, 13S, 14E/M/S, 15G/I/T, 16N/S, 18A, 19C/G/L/P/Q, 22H/R/Y, 26G, 27G/L, 28I/W, 30S, 31E/F/R/W, 32A/R/S, 36A, 38F/L/M/R/Y, 41M, 43A, 46L/Q, 49A/R, 50C/T, 52L, 54A/L/P/V, 55E/F/L/M/S/T/V, 60A/G/P/S/T, 61K/S, 62T, 63M, 64A/K/L/Q/R/V, 65A/I/R/S, 66A/G/R, 68A/G/P/Q, 69D, 72V, 74I/S, 75F/H/L/V/W, 76G/S, 77G/H, 79E/K, 80I/M/S, 87R, 88L/N/P, 91L, 97V, 98G/M/W, 107L, 113M, 114L/Q/S/T/V, 110K, 115G/Q/S/T/Y, 116M, 117M, 118H/P, 119L/M, 120S, 121G, 123V, 126C, 127L, 128W, 130I, 133G, 134L/Q, 135A/L/V, 136I/K/L/M/R/V, 137A/F/I, 138L/V, 139E/L/R, 141C/R/W/Y, 142F/W, 143G/N, 144A/C/I/T, 145C/D, 146E, 147C/E/G/K/M/V/Y, 148M, 149C, 150T, 151A, 152I, 156A/K/M/R/S, 157L, 160C, 163R, 165A, 167G, 170L, 176V, 180R/T, 182R, 183L/N, 189M, 190Q, 192C/V, 196L/R, 199L, 201Q/W, 204P, 205L/R, 207D/L/T, 208Q, 209K/L/R, 210E/P/V/W, 211M/V, 212T/Y, 213S, 216G/L/S, 217C/L/M/P/W, 223G/T, 225G/H/I/L, 227S, 229L/S/T, 231P, 238Q, 240G, 242V, 246P, 248G, 249A, 251D, 257V/W, 258Y, 260F, 261R/S, 263C, 264V, 265L, 266I/R/Y, 268Q, 269V, 270T, 273H/S/T, 276S/W, 277A/S, 279L/S/W, 280R, 284T, 285L/P/Q/R/V, 288I/L/N, 291G/N/P/R/S/T/W, 292A/G/Q/T/Y, 293M/R, 295I/L, 297L/N/P, 298L/T, 299F/I/L/M/S/T/V, 300A/F/I/L/M/N/Q/R/S/W/Y, 301A/C/D/F/H/K/M/R/S, 302C, 303K/M/R, 304I/P/Q/S/W, 306R, 308A/L, 309A/F/H/M/P/R, 310L, 311V, 312G, 313L, 314G/S/V/W, 315I, 316E/H/M/R, 317A/F/G/I/L/Q/R/S/T/V/W/Y, 318P, 320G/W, 323P, 324L, 329V, 339V, 340P, 343F, 344C/L, 345N, 347G/P/R, 348H/L/R/S/V, 349C, 350A/C/L/V, 352H/M/R/S/W/Y, 353I/R/V, 354C/L/S, 355P, 356S, 358G, 360R, 361P, 363A/V, 364L, 369N, 370H/L/M/T, 372G/L/P/R/S/Y, 373P/T/V, 374A/C/E/Q/R/W, 375A/T/V/Y, 376R/S/Y, 391G/P/Q/R, 383R, 384K, 385E/V, 387T, 390G, 392I/P, 393F/H/L/Q/S, 394H, 395A/Q, 398Y, 400P, 402E/M, 404L/M, 405D, 406I/L, 407L/M/R, 408V, or 409A, or combinations thereof, wherein the amino acid positions are relative to the reference sequence corresponding to amino acid residues 12-417 of SEQ ID NO: 4, or relative to the reference sequence corresponding to SEQ ID NO: 4.

8. The engineered acetate kinase of any one of claims 1-5, wherein the amino acid sequence of the engineered acetate kinase comprises at least a substitution at amino acid position 32, 54, 88, 147, 209, 277, 279, 293, 299, 313, or 344, or combinations thereof, wherein the amino acid positions are relative to the reference sequence corresponding to amino acid residues 12-417 of SEQ ID NO: 4, or relative to the reference sequence corresponding to SEQ ID NO: 4.

9. The engineered acetate kinase of any one of claims 1-5, wherein the amino acid sequence of the engineered acetate kinase comprises at least a substitution or amino acid residue 32A/R/S, 54A/L/P/V, 88L/N/P, 147C/E/G/K/M/V/Y, 209K/L/R, 277A/S, 279L/S/W, 293M/R, 299F/I/L/M/S/T/V, 313G/S/V/W, or 344C/L, or combinations thereof, wherein the amino acid positions are relative to the reference sequence corresponding to amino acid residues 12-417 of SEQ ID NO: 4, or relative to the reference sequence corresponding to SEQ ID NO: 4.

10. The engineered acetate kinase of any one of claims 1-5, wherein the amino acid sequence of the engineered acetate kinase comprises at least a substitution or amino acid residue 32R, 54L, 88P, 147V, 209L, 277A, 279W, 293R, 299V, 313L, 344L, or combinations thereof, wherein the amino acid positions are relative to the reference sequence corresponding to amino acid residues 12-417 of SEQ ID NO: 4, or relative to the reference sequence corresponding to SEQ ID NO: 4.

11. The engineered acetate kinase of any one of claims 1-5, wherein the amino acid sequence of the engineered acetate kinase comprises at least a substitution set at amino acid positions 147/299/313/344, wherein the amino acid positions are relative to the reference sequence corresponding to amino acid residues 12-417 of SEQ ID NO: 4, or relative to the reference sequence corresponding to SEQ ID NO: 4.

12. The engineered acetate kinase of any one of claims 1-5, wherein the amino acid sequence of the engineered acetate kinase comprises at least a substitution set, or amino acid residues 147V/299V/313L/344L, wherein the amino acid positions are relative to the reference sequence corresponding to amino acid residues 12-417 of SEQ ID NO: 4, or relative to the reference sequence corresponding to SEQ ID NO: 4.

13. The engineered acetate kinase of any one of claims 1-5, wherein the amino acid sequence of the engineered acetate kinase comprises at least a substitution or substitution set at amino acid position(s) 98, 404, 137/144, 77, 75, 115, 136, 147, 147/308, 15, 141, 146, 120/135, 160, 217, 135, 148, 301, 130, 11/50, 156, 16, 144/145, 348, 144, 26, 66, 138, 49, 157, 196, 270, 170, 142, 41/97, 369, 74, 52, 352, 373, 27, 280, 137, 126, 285, 19, 46, 276, 145, 205, 313, 348, 372, 69, 68, 392, 72, 50, 69/148/348/372/392, 52/69/148/348/392, 52/148/348/372, 147/205/313/373/408, 69/148/348/392, 52/348/372, 69/148/348, 52/136/348/372, 148/348, 348/372/392, 52/348/392, 136/348, 348/372, 69/136/348, 136/313/352/373/408, 147/313/352/408, 52/148/348, 148/348/372, 52/136/348, 52/69/348/372/392, 348/392, 147/313, 69/148/372/392, 136/148/348/392, 136/372, 69/348/392, 147/205, 69/136/372/392, 69/136/372, 147/205/352, 148/372, 52/69/348/372, 52/69/348, 136/373, 68/136/313/408, 136/205/313/352/408, 147/352/408, 52/148/372, 205/313/352, 313/352/408, 143/313/408, 136/352/373, 147/352, 68/313, 136/205/408, 68/136/408, 313/408, 69/148, 52/372/392, 148/392, 5/52/69/372/392, 136/348/392, 136/313/352, 136/313, 52/148, 372/392, 52/69/372, 136/205/313, 205/208/313, 136/352/408, 205/313, 52/136, 313/352, 136/148/348, 136/408, 136/392, 68/136, 136/205, 69/136, 52/136/372/392, 52/148/392, 68/136/205/352, 205/352/373/408, 69/392, 136/205/352, 205/408, 205/352/408, 408, 52/69, 52/69/392, 69/136/348/372, 69/136/148/392, 68/352/373/408, 68/352, 52/392, 136/147/205/373/408, or 205/352, wherein the amino acid positions are relative to the reference sequence corresponding to amino acid residues 12-417 of SEQ ID NO: 4, or relative to the reference sequence corresponding to SEQ ID NO: 4.

14. The engineered acetate kinase of any one of claims 1-5 and 13, wherein the amino acid sequence of the engineered acetate kinase comprises at least a substitution or substitution set, or amino acid residue(s) 98W, 404M, 137F/144I, 98M, 77G, 75F, 115S, 75W, 136I, 147V, 147E, 147K/308A, 15G, 75L, 141Y, 146E, 136V, 120S/135L, 160C, 217C, 135A, 148M, 301A, 130I, 15T, 11D/50T, 156R, 16N, 144T/145C, 348V, 98G, 144C, 75H, 26G, 66G, 138L, 49R, 66R, 157L, 156M, 147G, 115Y, 136K, 196L, 75V, 270T, 141C, 170L, 147Y, 142W, 147M, 41M/97V, 369N, 74I, 52L, 352S, 373V, 27L, 115T, 136R, 135V, 280R, 137I, 126C, 404L, 285L, 141R, 19C, 137A, 136M, 46L, 142F, 15I, 276S, 145D, 115G, 46Q, 205L, 77H, V77H, 141W, 115Q, 156K, 348S, 313L, 348R, 372R, 147C, 352H, 136L, 69D, 68P, 392I, 72V, 50C, 66A, 156S, 276W, 156A, 69D/148M/348S/372R/392I, 52L/69D/148M/348S/392I, 52L/148M/348S/372R, 147V/205L/313L/373V/408V, 69D/148M/348S/392I, 52L/348S/372R, 69D/148M/348S, 52L/136L/348S/372R, 148M/348S, 348S/372R/392I, 52L/348S/392I, 136L/348S, 348S/372R, 69D/136L/348S, 136V/313L/352H/373V/408V, 147V/313L/352H/408V, 52L/148M/348S, 148M/348R/372R, 148M/348R, 52L/136L/348S, 52L/69D/348R/372R/392I, 348S/392I, 147V/313L, 69D/148M/372R/392I, 136L/148M/348S/392I, 136L/372R, 348R/392I, 69D/348R/392I, 147V/205L, 69D/136L/372R/392I, 69D/136L/372R, 147V/205L/352H, 148M/372R, 52L/69D/348R/372R, 52L/69D/348R, 136V/373V, 68P/136V/313L/408V, 136V/205L/313L/352H/408V, 147V/352H/408V, 52L/148M/372R, 205L/313L/352H, 313L/352H/408V, 143N/313L/408V, 136V/352H/373V, 147V/352H, 68P/313L, 136V/205L/408V, 68P/136V/408V, 313L/408V, 69D/148M, 52L/372R/392I, 148M/392I, 5N/52L/69D/372R/392I, 69D/136L/348R, 136L/348R/392I, 136V/313L/352H, 52L/148M/348R, 136V/313L, 52L/148M, 372R/392I, 52L/69D/372R, 136V/205L/313L, 205L/208Q/313L, 136V/352H/408V, 205L/313L, 52L/136L, 313L/352H, 136L/148M/348R, 136V/408V, 136L/392I, 68P/136V, 136V/205L, 69D/136L, 52L/348R/372R, 52L/136L/372R/392I, 52L/148M/392I, 68P/136V/205L/352H, 205L/352H/373V/408V, 69D/392I, 136V/205L/352H, 205L/408V, 205L/352H/408V, 408V, 52L/136L/348R, 52L/69D, 52L/69D/392I, 69D/136L/348R/372R, 69D/136L/148M/392I, 68P/352H/373V/408V, 68P/352H, 52L/392I, 136V/147V/205L/373V/408V, or 205L/352H, wherein the amino acid positions are relative to the reference sequence corresponding to amino acid residues 12-417 of SEQ ID NO: 4, or relative to the reference sequence corresponding to SEQ ID NO: 4.

15. The engineered acetate kinase of claim 1, wherein the amino acid sequence of the engineered acetate kinase comprises at least one substitution set forth in Tables 7.2, 8.2, 9.2, 10.2, 11.2, 12.2, 14.2, 15.2, 16.2, 17.2, 19.2, 22.2, 23.2, 24.2, 25.2, 26.2, 27.2, and 28.2, wherein the amino acid positions are relative to the reference sequence corresponding to amino acid residues 12-417 of SEQ ID NO: 4, or relative to the reference sequence corresponding to SEQ ID NO: 4.

16. The engineered acetate kinase of claim 1, wherein the amino acid sequence of the engineered acetate kinase comprises at least a substitution or substitution set of an engineered acetate kinase variant set forth in Tables 7.2, 8.2, 9.2, 10.2, 11.2, 12.2, 14.2, 15.2, 16.2, 17.2, 19.2, 22.2, 23.2, 24.2, 25.2, 26.2, 27.2, and 28.2, wherein the amino acid positions are relative to the reference sequence corresponding to amino acid residues 12-417 of SEQ ID NO: 4, or relative to the reference sequence corresponding to SEQ ID NO: 4.

17. The engineered acetate kinase of claim 1, wherein the acetate kinase comprises an amino acid sequence having at least 70%, 75%, 80%, 81%, 82%, 83%, 84%, 85%, 86%, 87%, 88%, 89%, 90%, 91%, 92%, 93%, 94%, 95%, 96%, 97%, 98%, 99% or more sequence identity to a reference amino acid sequence comprising a substitution or substitution set of an engineered acetate kinase variant set forth in Tables 7.2, 8.2, 9.2, 10.2, 11.2, 12.2, 14.2, 15.2, 16.2, 17.2, 19.2, 22.2, 23.2, 24.2, 25.2, 26.2, 27.2, and 28.2, wherein the amino acid positions are relative to the reference sequence corresponding to amino acid residues 12-417 of SEQ ID NO: 4, or relative to the reference sequence corresponding to SEQ ID NO: 4.

18. The engineered acetate kinase of claim 1, comprising an amino acid sequence having at least 70%, 75%, 80%, 81%, 82%, 83%, 84%, 85%, 86%, 87%, 88%, 89%, 90%, 91%, 92%, 93%, 94%, 95%, 96%, 97%, 98%, 99%, or more sequence identity to the reference sequence corresponding to residues 12-417 of SEQ ID NO: 254, 396, 620, 846, 1240, or 1250, or to the reference sequence corresponding to SEQ ID NO: 254, 396, 620, 846, 1240, or 1250.

19. The engineered acetate kinase of claim 1, comprising an amino acid sequence having at least 70%, 75%, 80%, 81%, 82%, 83%, 84%, 85%, 86%, 87%, 88%, 89%, 90%, 91%, 92%, 93%, 94%, 95%, 96%, 97%, 98%, 99%, or more sequence identity to a reference sequence corresponding to residues 12-417 of an even-numbered SEQ ID NO. of SEQ ID NOs: 14-566, 612-868, 894-924, and 940-1390, or to a reference sequence corresponding to an even-numbered SEQ ID NO. of SEQ ID NOs: 14-566, 612-868, 894-924, and 940-1390.

20. The engineered acetate kinase of claim 1, comprising an amino acid sequence having at least 70%, 75%, 80%, 81%, 82%, 83%, 84%, 85%, 86%, 87%, 88%, 89%, 90%, 91%, 92%, 93%, 94%, 95%, 96%, 97%, 98%, 99%, or more sequence identity to the reference sequence corresponding to residues 12-417 of SEQ ID NO: 254, 396, 620, 846, 1240, or 1250, or to the reference sequence corresponding to SEQ ID NO: 254, 396, 620, 846, 1240, or 1250, wherein the amino acid sequence comprises one or more substitutions relative to the reference sequence corresponding to residues 12-417 of SEQ ID NO: 254, 396, 620, 846, 1240, or 1250, or relative to the reference sequence corresponding to SEQ ID NO: 254, 396, 620, 846, 1240, or 1250.

21. The engineered acetate kinase of claim 1, comprising an amino acid sequence having at least 70%, 75%, 80%, 81%, 82%, 83%, 84%, 85%, 86%, 87%, 88%, 89%, 90%, 91%, 92%, 93%, 94%, 95%, 96%, 97%, 98%, 99%, or more sequence identity to the reference sequence corresponding to residues 12-417 of an even-numbered SEQ ID NO. of SEQ ID NOs: 14-566, 612-868, 894-924, and 940-1390, or to the reference sequence corresponding to an even-numbered SEQ ID NO. of SEQ ID NOs: 14-566, 612-868, 894-924, and 940-1390, wherein the amino acid sequence comprises one or more substitutions relative to the reference sequence corresponding to residues 12-417 of SEQ ID NO: 254, 396, 620, 846, 1240, or 1250, or relative to the reference sequence corresponding to SEQ ID NO: 254, 396, 620, 846, 1240, or 1250.

22. The engineered acetate kinase of claim 20 or 21, wherein the amino acid sequence of the engineered acetate kinase comprises at least a substitution at amino acid position 4, 5, 10, 11, 13, 14, 15, 16, 18, 19, 22, 26, 27, 28, 30, 31, 32, 36, 38, 41, 43, 46, 49, 50, 52, 54, 55, 60, 61, 62, 63, 64, 65, 66, 68, 69, 72, 74, 75, 76, 77, 79, 80, 87, 88, 91, 97, 98, 107, 113, 114, 110, 115, 116, 117, 118, 119, 120, 121, 123, 126, 127, 128, 130, 133, 134, 135, 136, 137, 138, 139, 141, 142, 143, 144, 145, 146, 147, 148, 149, 150, 151, 152, 156, 157, 160, 163, 165, 167, 170, 176, 180, 182, 183, 189, 190, 192, 196, 199, 201, 204, 205, 207, 208, 209, 210, 211, 212, 213, 216, 217, 223, 225, 227, 229, 231, 238, 240, 242, 246, 248, 249, 251, 257, 258, 260, 261, 263, 264, 265, 266, 268, 269, 270, 273, 276, 277, 279, 280, 284, 285, 288, 291, 292, 293, 295, 297, 298, 299, 300, 301, 302, 303, 304, 306, 308, 309, 310, 311, 312, 313, 314, 315, 316, 317, 318, 320, 323, 324, 329, 339, 340, 343, 344, 345, 347, 348, 349, 350, 352, 353, 354, 355, 356, 358, 360, 361, 363, 364, 369, 370, 372, 373, 374, 375, 376, 383, 384, 385, 387, 390, 391, 392, 393, 394, 395, 398, 400, 402, 404, 405, 406, 407, 408, or 409, or combinations thereof, wherein the amino acid positions are relative to the reference sequence corresponding to residues 12-417 of SEQ ID NO: 254, 396, 620, 846, 1240, or 1250, or relative to the reference sequence corresponding to SEQ ID NO: 254, 396, 620, 846, 1240, or 1250.

23. The engineered acetate kinase of any one of claims 20-22, wherein the amino acid sequence of the engineered acetate kinase comprises at least a substitution or amino acid residue 4Y, 5N, 10I, 11D, 13S, 14E/M/S, 15G/I/T, 16N/S, 18A, 19C/G/L/P/Q, 22H/R/Y, 26G, 27G/L, 28I/W, 30S, 31E/F/R/W, 32A/R/S, 36A, 38F/L/M/R/Y, 41M, 43A, 46L/Q, 49A/R, 50C/T, 52L, 54A/L/P/V, 55E/F/L/M/S/T/V, 60A/G/P/S/T, 61K/S, 62T, 63M, 64A/K/L/Q/R/V, 65A/I/R/S, 66A/G/R, 68A/G/P/Q, 69D, 72V, 74I/S, 75F/H/L/V/W, 76G/S, 77G/H, 79E/K, 80I/M/S, 87R, 88L/N/P, 91L, 97V, 98G/M/W, 107L, 113M, 114L/Q/S/T/V, 110K, 115G/Q/S/T/Y, 116M, 117M, 118H/P, 119L/M, 120S, 121G, 123V, 126C, 127L, 128W, 130I, 133G, 134L/Q, 135A/L/V, 136I/K/L/M/R/V, 137A/F/I, 138L/V, 139E/L/R, 141C/R/W/Y, 142F/W, 143G/N, 144A/C/I/T, 145C/D, 146E, 147C/E/G/K/M/V/Y, 148M, 149C, 150T, 151A, 152I, 156A/K/M/R/S, 157L, 160C, 163R, 165A, 167G, 170L, 176V, 180R/T, 182R, 183L/N, 189M, 190Q, 192C/V, 196L/R, 199L, 201Q/W, 204P, 205L/R, 207D/L/T, 208Q, 209K/L/R, 210E/P/V/W, 211M/V, 212T/Y, 213S, 216G/L/S, 217C/L/M/P/W, 223G/T, 225G/H/I/L, 227S, 229L/S/T, 231P, 238Q, 240G, 242V, 246P, 248G, 249A, 251D, 257V/W, 258Y, 260F, 261R/S, 263C, 264V, 265L, 266I/R/Y, 268Q, 269V, 270T, 273H/S/T, 276S/W, 277A/S, 279L/S/W, 280R, 284T, 285L/P/Q/R/V, 288I/L/N, 291G/N/P/R/S/T/W, 292A/G/Q/T/Y, 293M/R, 295I/L, 297L/N/P, 298L/T, 299F/I/L/M/S/T/V, 300A/F/I/L/M/N/Q/R/S/W/Y, 301A/C/D/F/H/K/M/R/S, 302C, 303K/M/R, 304I/P/Q/S/W, 306R, 308A/L, 309A/F/H/M/P/R, 310L, 311V, 312G, 313F/L, 314G/S/V/W, 315I, 316E/H/M/R, 317A/F/G/I/L/Q/R/S/T/V/W/Y, 318P, 320G/W, 323P, 324L, 329V, 339V, 340P, 343F, 344C/L, 345N, 347G/P/R, 348H/L/R/S/V, 349C, 350A/C/L/V, 352H/M/R/S/W/Y, 353I/R/V, 354C/L/S, 355P, 356S, 358G, 360R, 361P, 363A/V, 364L, 369N, 370H/L/M/T, 372G/L/P/R/S/Y, 373P/T/V, 374A/C/E/Q/R/W, 375A/T/V/Y, 376R/S/Y, 391G/P/Q/R, 383R, 384K, 385E/V, 387T, 390G, 392I/P, 393F/H/L/Q/S, 394H, 395A/Q, 398Y, 400P, 402E/M, 404L/M, 405D, 406I/L, 407L/M/R, 408V, or 409A, or combinations thereof, wherein the amino acid positions are relative to the reference sequence corresponding to residues 12-417 of SEQ ID NO: 254, 396, 620, 846, 1240, or 1250, or relative to the reference sequence corresponding to SEQ ID NO: 254, 396, 620, 846, 1240, or 1250.

24. The engineered acetate kinase of any one of claims 20-22, wherein the amino acid sequence of the engineered acetate kinase comprises at least a substitution at amino acid position 32, 54, 88, 147, 209, 277, 279, 293, 299, 313, or 344, or combinations thereof, wherein the amino acid positions are relative to the reference sequence corresponding to amino acid residues 12-417 of SEQ ID NO: 254, 396, 620, 846, 1240, or 1250, or relative to the reference sequence corresponding to SEQ ID NO: 254, 396, 620, 846, 1240, or 1250.

25. The engineered acetate kinase of any one of claims 20-22, wherein the amino acid sequence of the engineered acetate kinase comprises at least a substitution or amino acid residue 32A/R/S, 54A/L/P/V, 88L/N/P, 147C/E/G/K/M/V/Y, 209K/L/R, 277A/S, 279L/S/W, 293M/R, 299F/I/L/M/S/T/V, 313G/S/V/W, or 344C/L, or combinations thereof, wherein the amino acid positions are relative to the reference sequence corresponding to amino acid residues 12-417 of SEQ ID NO: 254, 396, 620, 846, 1240, or 1250, or relative to the reference sequence corresponding to SEQ ID NO: 254, 396, 620, 846, 1240, or 1250.

26. The engineered acetate kinase of any one of claims 20-22, wherein the amino acid sequence of the engineered acetate kinase comprises at least a substitution or amino acid residue 32R, 54L, 88P, 147V, 209L, 277A, 279W, 293R, 299V, 313L, or 344L, or combinations thereof, wherein the amino acid positions are relative to the reference sequence corresponding to amino acid residues 12-417 of SEQ ID NO: 254, 396, 620, 846, 1240, or 1250, or relative to the reference sequence corresponding to SEQ ID NO: 254, 396, 620, 846, 1240, or 1250.

27. The engineered acetate kinase of claim 20, comprising an amino acid sequence having at least 70%, 75%, 80%, 81%, 82%, 83%, 84%, 85%, 86%, 87%, 88%, 89%, 90%, 91%, 92%, 93%, 94%, 95%, 96%, 97%, 98%, 99%, or more sequence identity to the reference sequence corresponding to residues 12-417 of SEQ ID NO: 254, or to the reference sequence corresponding to SEQ ID NO: 254, wherein the amino acid sequence comprises one or more substitutions relative to the reference sequence corresponding to residues 12-417 of SEQ ID NO: 254, or relative to the reference sequence corresponding to SEQ ID NO: 254.

28. The engineered acetate kinase of claim 21, comprising an amino acid sequence having at least 70%, 75%, 80%, 81%, 82%, 83%, 84%, 85%, 86%, 87%, 88%, 89%, 90%, 91%, 92%, 93%, 94%, 95%, 96%, 97%, 98%, 99%, or more sequence identity to the reference sequence corresponding to residues 12-417 of an even-numbered SEQ ID NO. of SEQ ID NOs: 396-566, or to the reference sequence corresponding to an even-numbered SEQ ID NO. of SEQ ID NOs: 396-566, wherein the amino acid sequence comprises one or more substitutions relative to the reference sequence corresponding to residues 12-417 of SEQ ID NO: 254, or relative to the reference sequence corresponding to SEQ ID NO: 254.

29. The engineered acetate kinase of claim 27 or 28, wherein the amino acid sequence of the engineered acetate kinase comprises at least a substitution or substitution set at amino acid position(s) 299, 300, 303, 317, 144, 374, 63, 301, 134, 60, 65, 68, 55, 301/308, 110, 139, 64, 192, 80, 61, 249, 376, 143, 395, 217, 248, 295, 285, 74, 62, 76, or 79, or combinations thereof, wherein the amino acid positions are relative to the reference sequence corresponding to residues 12-417 of SEQ ID NO: 254, or relative to the reference sequence corresponding to SEQ ID NO: 254.

30. The engineered acetate kinase of any one of claims 27-29, wherein the amino acid sequence of the engineered acetate kinase comprises at least a substitution or amino acid residue 299V, 299F, 299L, 299T, 299M, 299S, 300R, 300L, 303K, 300A, 303R, 300S, 300F, 300I, 300Q, 300Y, 300N, 317L, 144A, 317Y, 303M, 374R, 63M, 301K, 134L, 301S, 60A, 300W, 65S, 68A, 60T, 301H, 60S, 65A, 55S, 301R/308L, 110K, 139E, 68P, 55E, 55T, 65R, 55V, 64Q, 192V, 80M, 60P, 61K, 134Q, 55M, 68G, 55F, 55L, 249A, 68Q, 301M, 376R, 139L, 317T, 301R, 143G, 395A, 217M, 376S, 80S, 139R, 217L, 64L, 64R, 64K, 248G, 64V, 295L, 285L, 74S, 62T, 65I, 395Q, 76G, 79E, 80I, 76S, 79K, 192C, 61S, or 64A, or combinations thereof, wherein the amino acid positions are relative to the reference sequence corresponding to residues 12-417 of SEQ ID NO: 254, or relative to the reference sequence corresponding to SEQ ID NO: 254.

31. The engineered acetate kinase of claim 20, comprising an amino acid sequence having at least 70%, 75%, 80%, 81%, 82%, 83%, 84%, 85%, 86%, 87%, 88%, 89%, 90%, 91%, 92%, 93%, 94%, 95%, 96%, 97%, 98%, 99%, or more sequence identity to the reference sequence corresponding to residues 12-417 of SEQ ID NO: 396, or to the reference sequence corresponding to SEQ ID NO: 396, wherein the amino acid sequence comprises one or more substitutions relative to the reference sequence corresponding to residues 12-417 of SEQ ID NO: 396, or relative to the reference sequence corresponding to SEQ ID NO: 396.

32. The engineered acetate kinase of claim 21 comprising an amino acid sequence having at least 70%, 75%, 80%, 81%, 82%, 83%, 84%, 85%, 86%, 87%, 88%, 89%, 90%, 91%, 92%, 93%, 94%, 95%, 96%, 97%, 98%, 99%, or more sequence identity to the reference sequence corresponding to residues 12-417 of an even-numbered SEQ ID NO. of SEQ ID NOs: 612-802, or to the reference sequence corresponding to an even-numbered SEQ ID NO. of SEQ ID NOs: 612-802, wherein the amino acid sequence comprises one or more substitutions relative to the reference sequence corresponding to residues 12-417 of SEQ ID NO: 396, or relative to the reference sequence corresponding to SEQ ID NO: 396.

33. The engineered acetate kinase of claim 31 or 32, wherein the amino acid sequence of the engineered acetate kinase comprises at least a substitution or substitution set at amino acid position(s) 55/303/308/343/344, 32/55/344, 55/303/308/344, 295/303/308, 60/300/301/317, 344, 300/301/316/317/374, 55/344, 374, 295/308, 300/301/317, 301/317, 55/303/308, 300/301/374, 308, 317, 288, 320, 298, 312, 353, 348, 375, 304, 216, 217, 391, 292, 285, 225, 373, 300, 352, 354, 133, 293, 309, 190, 314, 297, 393, 350, 301, 372, 310, 299, 291, 284, or 313, wherein the amino acid positions are relative to the reference sequence corresponding to residues 12-417 of SEQ ID NO: 396, or relative to the reference sequence corresponding to SEQ ID NO: 396.

34. The engineered acetate kinase of any one of claims 31-33, wherein the amino acid sequence of the engineered acetate kinase comprises at least a substitution or substitution set, or amino acid residue(s) 55S/303R/308L/343F/344L, 32S/55S/344L, 55S/303R/308L/344L, 295I/303R/308L, 60G/300L/301K/317Y, 344L, 300A/301K/316M/317Y/374Q, 55S/344L, 374C, 295I/308L, 300L/301K/317Y, 301R/317Y, 55E/303R/308L, 300A/301R/374Q, 308L, 317R, 288I, 320W, 298T, 312G, 317W, 288N, 353V, 348S, 375T, 304W, 216L, 217P, 391G, 292T, 285V, 225L, 373P, 348L, 353R, 285P, 300W, 292Y, 285R, 352Y, 374R, 354L, 133G, 293M, 288L, 309F, 317Q, 190Q, 391P, 304I, 300L, 375A, 314V, 314W, 309H, 297N, 285Q, 393F, 292Q, 391Q, 350C, 301C, 225G, 372L, 317T, 317G, 310L, 299F, 300S, 304P, 372S, 317L, 301F, 301D, 352W, 291R, 317S, 284T, 375V, 374E, 374A, 301R, 354C, 317V, 352R, 374W, 313F, 354S, 372Y, 216S, 350L, 298L, 297P, 373T, 301H, or 225H, wherein the amino acid positions are relative to the reference sequence corresponding to residues 12-417 of SEQ ID NO: 396, or relative to the reference sequence corresponding to SEQ ID NO: 396.

35. The engineered acetate kinase of claim 20, comprising an amino acid sequence having at least 70%, 75%, 80%, 81%, 82%, 83%, 84%, 85%, 86%, 87%, 88%, 89%, 90%, 91%, 92%, 93%, 94%, 95%, 96%, 97%, 98%, 99%, or more sequence identity to the reference sequence corresponding to residues 12-417 of SEQ ID NO: 620, or to the reference sequence corresponding to SEQ ID NO: 620, wherein the amino acid sequence comprises one or more substitutions relative to the reference sequence corresponding to residues 12-417 of SEQ ID NO: 620, or relative to the reference sequence corresponding to SEQ ID NO: 620.

36. The engineered acetate kinase of claim 21, comprising an amino acid sequence having at least 70%, 75%, 80%, 81%, 82%, 83%, 84%, 85%, 86%, 87%, 88%, 89%, 90%, 91%, 92%, 93%, 94%, 95%, 96%, 97%, 98%, 99%, or more sequence identity to the reference sequence corresponding to residues 12-417 of an even-numbered SEQ ID NO. of SEQ ID NOs: 804-868, 894-924, 940-980, 1240, 1250, and 1388-1390, or to the reference sequence corresponding to an even-numbered SEQ ID NO. of SEQ ID NOs: 804-868, 894-924, 940-980, 1240, 1250, and 1388-1390, wherein the amino acid sequence comprises one or more substitutions relative to the reference sequence corresponding to residues 12-417 of SEQ ID NO: 620, or relative to the reference sequence corresponding to SEQ ID NO: 620.

37. The engineered acetate kinase of claim 35 or 36, wherein the amino acid sequence of the engineered acetate kinase comprises at least a substitution at amino acid position 350, 376, 393, 372, 279, 300, 291, 314, 10, 285, 373, 317, 238, 216, 304, 309, 293, 246, 27, 391, 196, 299, or 349, or combinations thereof, wherein the amino acid positions are relative to the reference sequence corresponding to residues 12-417 of SEQ ID NO: 620, or relative to the reference sequence corresponding to SEQ ID NO: 620.

38. The engineered acetate kinase of any one of claims 35-37, wherein the amino acid sequence of the engineered acetate kinase comprises at least a substitution or amino acid residue 350A, 376Y, 393S, 372P, 279L, 300Q, 300M, 291T, 314S, 372S, 10I, 285Q, 373V, 317W, 238Q, 216S, 304S, 304Q, 350V, 309M, 279S, 293R, 246P, 314G, 27G, 391R, 317I, 393Q, 196R, 299L, 349C, 317F, or 309P, or combinations thereof, wherein the amino acid positions are relative to the reference sequence corresponding to residues 12-417 of SEQ ID NO: 620, or relative to the reference sequence corresponding to SEQ ID NO: 620.

39. The engineered acetate kinase of claim 35 or 36, wherein the amino acid sequence of the engineered acetate kinase comprises at least a substitution or substitution set at amino acid position(s) 251, 242, 393, 18, 299, 316, 344, 400, 340, 347, 217, 394, 22, 309, 372, 285, 291, 297, 300, 279, 43, 225, 216, 352, 302, 292, 353, 189, 375, 279/293, 32/54/88/209/277/279/293, 32/38/54/88/209/277/279/293, or 16/32/38/54/88/209/277/279/293, wherein the amino acid positions are relative to the reference sequence corresponding to residues 12-417 of SEQ ID NO: 620, or relative to the reference sequence corresponding to SEQ ID NO: 620.

40. The engineered acetate kinase of any one of claims 35, 36, and 39, wherein the amino acid sequence of the engineered acetate kinase comprises at least a substitution or substitution set, or amino acid residue(s) 251D, 242V, 393L, 18A, 299I, 316H, 344C, 400P, 340P, 347R, 217W, 394H, 22H, 309A, 372G, 347P, 285R, 291P, 291S, 297L, 291N, 300R, 291G, 279W, 43A, 225I, 216G, 352M, 302C, 309R, 22R, 292A, 291W, 353I, 189M, 375Y, 316R, 279W/293R, 32R/54L/88P/209L/277A/279W/293R, 32R/38L/54L/88P/209L/277A/279W/293R, or 16S/32R/38L/54L/88P/209L/277A/279W/293R, wherein the amino acid positions are relative to the reference sequence corresponding to residues 12-417 of SEQ ID NO: 620, or relative to the reference sequence corresponding to SEQ ID NO: 620.

41. The engineered acetate kinase of claim 20, comprising an amino acid sequence having at least 70%, 75%, 80%, 81%, 82%, 83%, 84%, 85%, 86%, 87%, 88%, 89%, 90%, 91%, 92%, 93%, 94%, 95%, 96%, 97%, 98%, 99%, or more sequence identity to the reference sequence corresponding to residues 12-417 of SEQ ID NO: 846, or to the reference sequence corresponding to SEQ ID NO: 846, wherein the amino acid sequence comprises one or more substitutions relative to the reference sequence corresponding to residues 12-417 of SEQ ID NO: 846, or relative to the reference sequence corresponding to SEQ ID NO: 846.

42. The engineered acetate kinase of claim 21 comprising an amino acid sequence having at least 70%, 75%, 80%, 81%, 82%, 83%, 84%, 85%, 86%, 87%, 88%, 89%, 90%, 91%, 92%, 93%, 94%, 95%, 96%, 97%, 98%, 99%, or more sequence identity to the reference sequence corresponding to residues 12-417 of an even-numbered SEQ ID NO. of SEQ ID NOs: 982-1238, or to the reference sequence corresponding to an even-numbered SEQ ID NO. of SEQ ID NOs: 982-1238, wherein the amino acid sequence comprises one or more substitutions relative to the reference sequence corresponding to residues 12-417 of SEQ ID NO: 846, or relative to the reference sequence corresponding to SEQ ID NO: 846.

43. The engineered acetate kinase of claim 41 or 42, wherein the amino acid sequence of the engineered acetate kinase comprises at least a substitution or substitution set at amino acid position(s) 19, 385, 231, 209, 31, 370, 183, 258, 14, 212, 355, 54, 240, 323, 356, 182, 263, 266, 119, 114, 118, 211, 358, 121, 277, 265, 306, 318, 28, 257, 269, 315, 38, 114/119/123, 205, 88, 152, 210, 384, 273, 180, 201, 402, 207, 127, 199, 128, 329, 91, 87, 264, 113/229, 30, 261, 398, 405, 363, 324, 204, 409, 213, 227, 361, 229, 383, 32/88, 149, 36, 88/387,360, 150, 270, 49/54, 176, 406, 260, 167, 268, 364, 390, 117, 13, 116, or 279/293, wherein the amino acid positions are relative to the reference sequence corresponding to residues 12-417 of SEQ ID NO: 846, or relative to the reference sequence corresponding to SEQ ID NO: 846.

44. The engineered acetate kinase of any one of claims 41-43, wherein the amino acid sequence of the engineered acetate kinase comprises at least a substitution or substitution set, or amino acid residue(s) 19L, 385E, 231P, 209K, 31F, 370L, 183L, 258Y, 14E, 212T, 355P, 54L, 240G, 323P, 356S, 182R, 263C, 266R, 119L, 114V, 118H, 211V, 358G, 114T, 54P, 121G, 277S, 265L, 306R, 318P, 28W, 257W, 269V, 114S, 315I, 38R, 114Q/119M/123V, 385V, 205R, 38L, 19Q, 31R, 88P, 19P, 14M, 38Y, 88N, 152I, 210E, 384K, 273T, 38M, 31W, 210V, 31E, 180T, 212Y, 201W, 402E, 207D, 127L, 199L, 210W, 209L, 14S, 266I, 128W, 329V, 118P, 91L, 87R, 264V, 113M/229S, 30S, 261R, 398Y, 405D, 363A, 324L, 204P, 370M, 409A, 213S, 54V, 227S, 361P, 114L, 207T, 229T, 383R, 209R, 32A/88L, 149C, 36A, 207L, 88L/387T, 360R, 183N, 150T, 270T, 273S, 180R, 210P, 49A/54A, 176V, 406L, 260F, 406I, 167G, 211M, 201Q, 229S, 229L, 268Q, 364L, 370T, 273H, 19G, 390G, 257V, 363V, 266Y, 402M, 117M, 38F, 261S, 13S, 370H, 116M, or 279W/293R, wherein the amino acid positions are relative to the reference sequence corresponding to residues 12-417 of SEQ ID NO: 846, or relative to the reference sequence corresponding to SEQ ID NO: 846.

45. The engineered acetate kinase of claim 20, comprising an amino acid sequence having at least 70%, 75%, 80%, 81%, 82%, 83%, 84%, 85%, 86%, 87%, 88%, 89%, 90%, 91%, 92%, 93%, 94%, 95%, 96%, 97%, 98%, 99%, or more sequence identity to the reference sequence corresponding to residues 12-417 of SEQ ID NO: 1240, or to the reference sequence corresponding to SEQ ID NO: 1240, wherein the amino acid sequence comprises one or more substitutions relative to the reference sequence corresponding to residues 12-417 of SEQ ID NO: 1240, or relative to the reference sequence corresponding to SEQ ID NO: 1240.

46. The engineered acetate kinase of claim 21 comprising an amino acid sequence having at least 70%, 75%, 80%, 81%, 82%, 83%, 84%, 85%, 86%, 87%, 88%, 89%, 90%, 91%, 92%, 93%, 94%, 95%, 96%, 97%, 98%, 99%, or more sequence identity to the reference sequence corresponding to residues 12-417 of an even-numbered SEQ ID NO. of SEQ ID NOs: 1242-1346, or to the reference sequence corresponding to an even-numbered SEQ ID NO. of SEQ ID NOs: 1242-1346, wherein the amino acid sequence comprises one or more substitutions relative to the reference sequence corresponding to residues 12-417 of SEQ ID NO: 1240, or relative to the reference sequence corresponding to SEQ ID NO: 1240.

47. The engineered acetate kinase of claim 45 or 46, wherein the amino acid sequence of the engineered acetate kinase comprises at least a substitution or substitution set at amino acid position(s) 19/22/285/300, 285/297/398, 127/183/297, 19/127/300, 32/54/88/209/277, 277/291, 127/183/300/398, 19/22/398, 32/54/209/277, 398, 16/28/54, 88/209/277, 127/297, 14/32/291, 19/127/183/297/300/398, 16/88, 54/277, 32, 16, 32/54/209, 22/183/297/398, 88, 14/209, 16/32/54/209/277, 19/127/292/300/398, 54/291, 54/88/277, 32/54/88/291, 209, 54/209, 209/291, 19/127, 291, 88/277, 32/209, 127/285, 32/88/209, 14/54/291, 14/88, 285/300, 127/285/297, 16/54/277, 88/209/223, 4, 32/88/277, 127/297/398, 32/209/291, 32/88, 22/38/127/300, 38/127/297, or 285/297, wherein the amino acid positions are relative to the reference sequence corresponding to residues 12-417 of SEQ ID NO: 1240, or relative to the reference sequence corresponding to SEQ ID NO: 1240.

48. The engineered acetate kinase of any one of claims 45-47, wherein the amino acid sequence of the engineered acetate kinase comprises at least a substitution or substitution set, or amino acid residue(s) 19Q/22R/285R/300R, 285R/297L/398Y, 127L/183N/297L, 19L/127L/300R, 32R/54L/88P/209L/277A, 277A/291P, 127L/183N/300R/398Y, 19Q/22R/398Y, 32R/54L/209R/277A, 398Y, 16S/28I/54L, 88P/209L/277A, 127L/297L, 14M/32R/291P, 19L/127L/183N/297L/300R/398Y, 16S/88P, 54L/277A, 32R, 16S, 32R/54L/209L, 22R/183N/297L/398Y, 88N, 14M/209R, 16S/32R/54L/209R/277A, 19Q/127L/292G/300R/398Y, 54L/291P, 54L/88N/277A, 32R/54L/88N/291P, 209R, 54L/209L, 209R/291P, 19Q/127L, 291P, 88P/277A, 88P, 32R/209L, 127L/285R, 32R/88N/209L, 14M/54L/291P, 14M/88P, 285R/300R, 127L/285R/297L, 209L/291P, 16S/54L/277A, 88N/209R/223T, 4Y, 32R/88P/277A, 127L/297L/398Y, 32R/209R/291P, 32R/88P, 22R/38L/127L/300R, 38F/127L/297L, or 285R/297L, wherein the amino acid positions are relative to the reference sequence corresponding to residues 12-417 of SEQ ID NO: 1240, or relative to the reference sequence corresponding to SEQ ID NO: 1240.

49. The engineered acetate kinase of claim 20, comprising an amino acid sequence having at least 70%, 75%, 80%, 81%, 82%, 83%, 84%, 85%, 86%, 87%, 88%, 89%, 90%, 91%, 92%, 93%, 94%, 95%, 96%, 97%, 98%, 99%, or more sequence identity to the reference sequence corresponding to residues 12-417 of SEQ ID NO: 1250, or to the reference sequence corresponding to SEQ ID NO: 1250, wherein the amino acid sequence comprises one or more substitutions relative to the reference sequence corresponding to residues 12-417 of SEQ ID NO: 1250, or relative to the reference sequence corresponding to SEQ ID NO: 1250.

50. The engineered acetate kinase of claim 21, comprising an amino acid sequence having at least 70%, 75%, 80%, 81%, 82%, 83%, 84%, 85%, 86%, 87%, 88%, 89%, 90%, 91%, 92%, 93%, 94%, 95%, 96%, 97%, 98%, 99%, or more sequence identity to the reference sequence corresponding to residues 12-417 of an even-numbered SEQ ID NO. of SEQ ID NOs: 1348-1386, or to the reference sequence corresponding to an even-numbered SEQ ID NO. of SEQ ID NOs: 1348-1386, wherein the amino acid sequence comprises one or more substitutions relative to the reference sequence corresponding to residues 12-417 of SEQ ID NO: 1250, or relative to the reference sequence corresponding to SEQ ID NO: 1250.

51. The engineered acetate kinase of claim 49 or 50, wherein the amino acid sequence of the engineered acetate kinase comprises at least a substitution at amino acid position 165, 345, 163, 320, 347, 316, 107, 348, 311, 339, 317, 22, 151, 138, 407, 223, 391, or 393, or combinations thereof, wherein the amino acid positions are relative to the reference sequence corresponding to residues 12-417 of SEQ ID NO: 1250, or relative to the reference sequence corresponding to SEQ ID NO: 1250.

52. The engineered acetate kinase of any one of claims 49-51, wherein the amino acid sequence of the engineered acetate kinase comprises at least a substitution, or amino acid residue 165A, 345N, 163R, 320G, 347G, 316E, 107L, 348H, 311V, 339V, 317A, 22Y, 151A, 138V, 407M, 407L, 223G, 391P, 393H, or 407R, wherein the amino acid positions are relative to the reference sequence corresponding to residues 12-417 of SEQ ID NO: 1250, or relative to the reference sequence corresponding to SEQ ID NO: 1250.

53. The engineered acetate kinase of any one of claims 1-5, wherein the amino acid sequence of the engineered acetate kinase comprises at least one substitution set forth in Tables 7.2, 8.2, 9.2, 10.2, 11.2, 12.2, 14.2, 15.2, 16.2, 17.2, 19.2, 22.2, 23.2, 24.2, 25.2, 26.2, 27.2, and 28.2, wherein the amino acid positions are relative to the reference sequence corresponding to amino acid residues 12-417 of SEQ ID NO: 4, 254, 396, 620, 846, 1240, or 1250, or relative to the reference sequence corresponding to SEQ ID NO: 4, 254, 396, 620, 846, 1240, or 1250.

54. The engineered acetate kinase of any one of claims 1-5, wherein the amino acid sequence of the engineered acetate kinase comprises at least a substitution or substitution set of an engineered acetate kinase variant set forth in Tables 7.2, 8.2, 9.2, 10.2, 11.2, 12.2, 14.2, 15.2, 16.2, 17.2, 19.2, 22.2, 23.2, 24.2, 25.2, 26.2, 27.2, and 28.2, wherein the amino acid positions are relative to the reference sequence corresponding to amino acid residues 12-417 of SEQ ID NO: 4, 254, 396, 620, 846, 1240, or 1250, or relative to the reference sequence corresponding to SEQ ID NO: 4, 254, 396, 620, 846, 1240, or 1250.

55. The engineered acetate kinase of any one of claims 1-5, wherein the acetate kinase comprises an amino acid sequence having at least 70%, 75%, 80%, 81%, 82%, 83%, 84%, 85%, 86%, 87%, 88%, 89%, 90%, 91%, 92%, 93%, 94%, 95%, 96%, 97%, 98%, 99% or more sequence identity to a reference amino acid sequence comprising a substitution or substitution set of an engineered acetate kinase variant set forth in Tables 7.2, 8.2, 9.2, 10.2, 11.2, 12.2, 14.2, 15.2, 16.2, 17.2, 19.2, 22.2, 23.2, 24.2, 25.2, 26.2, 27.2, and 28.2, wherein the amino acid positions are relative to the reference sequence corresponding to amino acid residues 12-417 of SEQ ID NO: 4, 254, 396, 620, 846, 1240, or 1250, or relative to the reference sequence corresponding to SEQ ID NO: 4, 254, 396, 620, 846, 1240, or 1250.

56. The engineered acetate kinase of claim 1, wherein the amino acid sequence of the engineered acetate kinase comprises residues 12-417 of an even-numbered SEQ ID NO. of SEQ ID NOs: 14-566, 612-868, 894-924, and 940-1390, or comprises an even-numbered SEQ ID NO. of SEQ ID NOs: 14-566, 612-868, 894-924, and 940-1390.

57. The engineered acetate kinase of claim 1, wherein the amino acid sequence of the engineered acetate kinase comprises residues 12-417 of SEQ ID NO: 254, 396, 620, 846, 1240, or 1250, or comprises SEQ ID NO: 254, 396, 620, 846, 1240, or 1250.

58. The engineered acetate kinase of any one of claims 1-57, having acetate kinase activity and at least one improved property as compared to a reference acetate kinase.

59. The engineered acetate kinase of claim 58, wherein the improved property is selected from i) increased activity in conversion of unmodified nucleoside diphosphate to corresponding nucleotide triphosphate, ii) increased activity in conversion of substrate 2′-fluoro-nucleoside 5′-diphosphate (2′-fluoro-NDP) to product 2′-fluoro-nucleoside-5′-triphosphate (2′-fluoro-NTP), iii) increased activity in conversion of substrate 2′-O-methyl nucleoside-5′-diphosphate (2′-O-methyl-NDP) to product 2′-O-methyl nucleoside-5′-triphosphate (2′-O-methyl-NTP), iv) increased activity in conversion of substrate 2′-fluoro-nucleoside 5′-diphosphate-3′-phosphate (2′-fluoro-NDP-3′-phosphate) to product 2′-fluoro-nucleoside-5′-triphosphate-3′-phosphate, v) increased activity in conversion of substrate 2′-O-methyl-nucleoside 5′-diphosphate-3′-phosphate to product 2′-O-methyl-nucleoside 5′-triphosphate-3′-phosphate, vi) increased stability, and vii) increased thermostability, or any combinations of i), ii), iii), iv), v), vi) and vii) compared to a reference acetate kinase.

60. The engineered acetate kinase of claim 58 or 59, wherein the reference acetate kinase has an amino acid sequence corresponding to residues 12-417 of SEQ ID NO: 4, 254, 396, 620, 846, 1240, or 1250, or an amino acid sequence corresponding to SEQ ID NO: 4, 254, 396, 620, 846, 1240, or 1250.

61. The engineered acetate kinase of any one of claims 1-60, comprising a fusion polypeptide.

62. The engineered acetate kinase of any one of claims 1-61, wherein the engineered acetate kinase is purified.

63. The engineered acetate kinase of any one of claims 1-61, wherein the engineered acetate kinase is immobilized on a support medium.

64. A recombinant polynucleotide comprising a polynucleotide sequence encoding an engineered acetate kinase of any one of claims 1-60.

65. The recombinant polynucleotide of claim 64, comprising a polynucleotide sequence having at least 70%, 75%, 80%, 81%, 82%, 83%, 84%, 85%, 86%, 87%, 88%, 89%, 90%, 91%, 92%, 93%, 94%, 95%, 96%, 97%, 98%, 99%, or more sequence identity to a reference polynucleotide sequence corresponding to nucleotide residues 34-1251 of SEQ ID NO: 3, 253, 395, 619, 845, 1239, or 1249, or to a reference polynucleotide sequence corresponding to SEQ ID NO: 3, 253, 395, 619, 845, 1239, or 1249, wherein the recombinant polynucleotide encodes an acetate kinase.

66. The recombinant polynucleotide of claim 64, comprising a polynucleotide sequence having at least 70%, 75%, 80%, 81%, 82%, 83%, 84%, 85%, 86%, 87%, 88%, 89%, 90%, 91%, 92%, 93%, 94%, 95%, 96%, 97%, 98%, 99%, or more sequence identity to a reference polynucleotide sequence corresponding to nucleotide residues 34-1251 of an odd-numbered SEQ ID NO. of SEQ ID NOs: 13-565, 611-867, 893-923, and 939-1389, or to a reference polynucleotide sequence corresponding to an odd-numbered SEQ ID NO. of SEQ ID NOs: 13-565, 611-867, 893-923, and 939-1389, wherein the recombinant polynucleotide encodes an engineered acetate kinase.

67. The recombinant polynucleotide of any one of claims 64-66, wherein the polynucleotide sequence includes preferred codons or is codon optimized.

68. The recombinant polynucleotide of claim 64, wherein the polynucleotide sequence comprises nucleotide residues 34-1251 of an odd-numbered SEQ ID NO. of SEQ ID NOs: 13-565, 611-867, 893-923, and 939-1389, or comprises an odd-numbered SEQ ID NO. of SEQ ID NOs: 13-565, 611-867, 893-923, and 939-1389.

69. An expression vector comprising a recombinant polynucleotide of any one of claims 64-68.

70. The expression vector of claim 69, wherein the recombinant polynucleotide is operably linked to a control sequence.

71. A host cell comprising an expression vector of any one of claims 69-70.

72. The host cell of claim 71, comprising a bacterial cell, fungal cell, insect cell, or mammalian cell.

73. A method of producing an engineered acetate kinase polypeptide, comprising culturing a host cell of claim 71 or 72 under suitable culture conditions such that the engineered acetate kinase polypeptide is produced.

74. The method of claim 73, further comprising recovering the acetate kinase from the culture and/or host cells.

75. The method of claim 73 or 74, further comprising purifying the engineered acetate kinase.

76. A composition comprising an engineered acetate kinase of any one of claims 1-62.

77. The composition of claim 76, further comprising a nucleoside diphosphate.

78. The composition of claim 77, wherein the nucleoside diphosphate is a modified nucleoside diphosphate.

79. The composition of claim 78, wherein the modified nucleoside diphosphate comprises a modified sugar moiety, modified nucleobase, and/or modified phosphate.

80. A method of converting a nucleoside diphosphate to a corresponding nucleoside triphosphate (NTP), comprising contacting a nucleoside diphosphate with an engineered acetate kinase of any one of claims 1-62 in the presence of phosphate donor under suitable reaction conditions to convert the nucleoside diphosphate to the corresponding product nucleoside triphosphate.

81. The method of claim 80, wherein the nucleoside diphosphate is an unmodified nucleoside diphosphate.

82. The method of claim 80, wherein the nucleoside diphosphate comprises a nucleobase selected from adenine, cytosine, guanine, thymine, uracil, xanthine, hypoxanthine, 2,6-diaminopurine, purine, 6,8-diaminopurine, 5-methylcytosine (m5° C.), 2-thiouridine, pseudouridine, dihydrouridine, inosine, and 7-methylguanosine (m7G).

83. The method of any one of claims 80-82, wherein the nucleoside diphosphate has at the 2′-position of the sugar moiety a H or OH.

84. The method of claim 83, wherein the nucleoside diphosphate is ADP, GDP, UDP, CDP, or TDP, and wherein the nucleoside has at the 2′-position of the sugar moiety an OH, thereby by resulting in corresponding product rATP, rGTP, rUTP, rCTP, or rTTP, respectively.

85. The method of claim 83, wherein the nucleoside diphosphate is ADP, GDP, UDP, CDP, or TDP, and wherein the nucleoside has at the 2′-position of the sugar moiety an H, thereby by resulting in corresponding product dATP, dGTP, dUTP, dCTP, or dTTP, respectively.

86. The method of claim 80, wherein the nucleoside diphosphate is a modified nucleoside diphosphate, wherein the modified nucleoside diphosphate has a modified sugar moiety, modified nucleobase, modified phosphate, or any combinations thereof.

87. The method of claim 86, wherein the modified nucleoside diphosphate comprises a modified sugar moiety.

88. The method of claim 87, wherein the modified sugar moiety has a modified 2′-position of the sugar moiety.

89. The method of claim 88, wherein the modified 2′-position is a 2′-O—R′, wherein in R′ is alkyl, aminoalkyl, cyanoalkyl, —C(O)-alkyl, or 2′-halo.

90. The method of claim 89, wherein the modified 2′-position is 2′-O-alkyl is 2′-O—CH₃, 2′-O—CH₂CH₃, 2′-O-(2-methoxyethyl), 2′-O-allyl, 2′-O-propargyl, 2′-O-aminoethyl, 2′-O-cyanoethyl, or 2′-O-acetalester.

91. The method of claim 89, wherein the modified 2′-position is 2′-halo.

92. The method of claim 91, wherein the modified 2′-position is 2′-F or 2′-Br.

93. The method of any one of claims 87-92, wherein the sugar moiety has a modified 3′-position of the sugar moiety.

94. The method of claim 93, wherein the 3′-position of the sugar moiety comprises a blocking group, wherein the blocking group is formate, benzoylformate, acetate, propionate, isobutyrate, aminoxy (—ONH₂), O-methyl, O-methoxymethyl, O-methylthiomethyl, O-benzyloxymethyl, O-allyl, 3′-O-(2-nitrobenzyl), O-azidomethyl (O—CH₂N₃), O-tert-butyldithiomethyl, phosphate, diphosphate, or triphosphate.

95. The method of claim 86, wherein the modified nucleoside-diphosphate comprises a modified 2′-position and 3′-position of the sugar moiety.

96. The method of claim 95, wherein the modified nucleotide-diphosphate comprises a modified 2′-position of 2′-O-alkyl is 2′-O—CH₃, 2′-O—CH₂CH₃, 2′-O-(2-methoxyethyl), 2′-O-allyl, 2′-O-propargyl, 2′-O-aminoethyl, 2′-O-cyanoethyl, 2′-O-acetalester, or 2′-fluoro, and a modified 3′-position of 3′-formate, 3′-benzoylformate, 3′-acetate, 3′-propionate, 3′-isobutyrate, 3′-aminoxy (—ONH₂), 3′-O-methyl, 3′-O-methoxymethyl, 3′-O-methylthiomethyl, 3′-O-benzyloxymethyl, 3′-O-allyl, 3′-O-(2-nitrobenzyl), 3′-O-azidomethyl (O—CH₂N₃), 3′-O-tert-butyldithiomethyl, 3′-phosphate, 3′-diphosphate, or 3′-triphosphate.

97. The method of claim 96, wherein the modified nucleotide diphosphate comprises a 2′-O-methyl or 2′-fluoro on the sugar moiety, and a 3′-phosphate.

98. The method of any one of claims 86-97, wherein the modified nucleoside diphosphate comprises a modified nucleobase.

99. The method of claim 98, wherein the modified nucleobase is selected from 5-bromo-uracil, 5-iodo-uracil, 6-mCEPh-purine, 6-phenylpyrrolocytidine, N2-alkyl 8-oxoguanosine, difluorotoluene, difluorobenzene, dichlorobenzene, imidazole, and benzimidazole.

100. The method of any one of claims 86-99, wherein the modified nucleoside diphosphate comprises a modified phosphate.

101. The method of claim 100, wherein the modified nucleoside diphosphate comprises an alpha-thiodiphosphate (NDPαS), thereby resulting in product nucleoside 5′-1-thio(triphosphate) (NTPαS).

102. The method of claim 101, wherein NDPαS is (Rp)-NDPαS, (Sp)-NDPαS, or a mixture of (Rp)-NDPαS and (Sp)-NDPαS diastereomers.

103. The method of claim 102, further comprising the step of separating the product (Rp)-NTPαS and (Sp)-NTPαS diastereomeric products.

104. The method of any one of claims 80-103, wherein the phosphate donor is acetyl phosphate.

105. The method of any one of claims 80-104, further comprising regenerating the acetyl phosphate with an acetyl phosphate regenerating system.

106. The method of claim 105, wherein the acetyl phosphate regenerating system comprises pyruvate oxidase and substrate pyruvate and phosphate.

107. The method of claim 105 or 106, further comprising removing byproduct H₂O₂ with a catalase.

The application's sequence listing, which the Patent Office published only in electronic form, follows.

SEQUENCE LISTING (1392 sequences)

SEQ ID NO: 1 - DNA, 1254 bp, synthetic construct
  misc_feature 1..1254: note = Wild-type acetate kinase
  source 1..1254: mol_type = other DNA
atgcaccatcatcatcatcatggcggtagcggcatgaaaattctggttatcaattcaggtagtagcagcgtgaaatatcagttcatcgatatgaacggcgaaaaagtcctttgcaagggaattgcggagcgcattggcatttcggggtctcgtctgatccataaagtacgcggcgaaaagcacgtgatcgagaaagacttgccggattacgaagttgcactgaaactcattttagataccctgatggacgaaaaactgggtgtgatcaaagatctgtccgaaattggtgctgtcggccatcgtgtagttcacggtggtgagatctttgccagtagcgtcttgattgacgacgaagtgattaaggtgctcgaagaatattcgtacttagccccactgcataaccctccgaatctgatgggcatcaaagcgtccatgaaactgctgccgaaggtgcccaacgttgcggtctttgatacggcattccaccaatcaatgccgcgcaaagcctttttgtatgcgatcccatacgagtattatgagaaataccgtatccgccgctatgggttccatggcactagccatcgttacgtgtcgaaacgtgctgctgaaattcttgggaagtcctataaagaactgaagatcattacctgtcacttaggcaatggtgcaagcattgcggcggttaagaacggcaaaagtgtggatacatctatgggatttacgccgcttgaaggtctggtaatgggaacccgctctggcgatattgatcctagcatcgtcgtctttctgcaggagaaagaaggtttaagtccgcaggacgtgtacgatattctcaataagaaatctggcgttctgggtctgtcgaaaggattctcacccgacatgcgtgatatcgaagaagccgcaatgaacggcgatgaaaccgcgcgtacggctttggacgtgtatgagtatcgcattgccaaatacattggtgcttatgcagcggtaatgaacggcgttgatgcgatcgtgtttactgccggtgtaggcgaaaatagcccgattattcgcgaagaaatctgcgagaactacctggggtatcttggcgtcaagatcgacaaagagaagaatgatgttatgggtgaagaacgtattattagtaccccggattccaaagtggcagttctggtgatcccaacaaacgaagaactcgtcattgctcgcgacaccaaagagatcgtagagaaagggatcaaagaactgaagattgtg

SEQ ID NO: 2 - protein, 418 aa, synthetic construct
  REGION 1..418: note = Wild-type acetate kinase
MHHHHHHGGSGMKILVINSGSSSVKYQFIDMNGEKVLCKGIAERIGISGSRLIHKVRGEKHVIEKDLPDYEVALKLILDTLMDEKLGVIKDLSEIGAVGHRVVHGGEIFASSVLIDDEVIKVLEEYSYLAPLHNPPNLMGIKASMKLLPKVPNVAVFDTAFHQSMPRKAFLYAIPYEYYEKYRIRRYGFHGTSHRYVSKRAAEILGKSYKELKIITCHLGNGASIAAVKNGKSVDTSMGFTPLEGLVMGTRSGDIDPSIVVFLQEKEGLSPQDVYDILNKKSGVLGLSKGFSPDMRDIEEAAMNGDETARTALDVYEYRIAKYIGAYAAVMNGVDAIVFTAGVGENSPIIREEICENYLGYLGVKIDKEKNDVMGEERIISTPDSKVAVLVIPTNEELVIARDTKEIVEKGIKELKIV

SEQ ID NO: 3 - DNA, 1251 bp, synthetic construct
  misc_feature 1..1251: note = Wild-type acetate kinase
  source 1..1251: mol_type = other DNA
atgcaccatcatcatcatcatggcggtagcggcatgaaagttctggtgattaattctggtagctcctccatcaaatatcagctcctcgatatgaccaacgaaaaggtattagcgaaaggcttggtcgagcgcattggcatcgacggttcgcgtatcgtgcataaagttaacggcgaaaaacacgtgctggaacatgagattaagaatcacgaaattggacttaaattggtcctggatcttcttacggacgaaaaatacggtgtgttgaaggatctcaaagaaatcgatgcagttgggcatcgcgtagtacatggcggcgagcgttttgccagtagcgtgaagattactgacgaagtcttaaagaccatcgagacgttgtcgttcttagctccgttacacaatccagcgaacattatgggtatcaagagcagcatgaaattattaccgggtgtgcctcaagttgccgtctttgatacagcgttccaccagaagatgccggagaaagcctatttgtacgcaatcccctatgagtactacgagaaatataaaattcgccgctatgggtttcatggaacctcacatcgttatgtgagtaaacgtgctgcggaaattatgggcaaaccgtacgatcagctcaagatcattaccgttcacgtgggtaacggcgcatcagttgcggcggtgaagaatggcgtatctgttgacacttccatgggtttcacaccacttgaaggtcttgtcatgggcacgcgcagcggcgatattgatccggccatcgtggaatttcttgagaaagaagaaggattgtcggccaaagaagtcgtcaacatcctcaacaagaaatctggtgtgtatgggctcaccaaaggctttagtagtgacatgcgtgacattgaagataatgctattgaaggtgatcctgtatgccgccttgcattcgatgtgtacgaatatcgtatcgcgaaatatattggcgcatacgctgcggccatgaacggtgttgacgcgatcgtctttaccgcaggagttggcgaaaatagcccgattatgcgcgaagaaattattgagaactacttgggctacttagggatcaagatcgataaagaagccaatgacttcaaaggtgaggagaagatcatttcaacgcccgattccaaagtgattgcgatggtagttccgaccaacgaggagctcatgatcgccaaagacacgaaagaaatcattgagaaagggttggacgagcttaagatc

SEQ ID NO: 4 - protein, 417 aa, synthetic construct
  REGION 1..417: note = Wild-type acetate kinase
MHHHHHHGGSGMKVLVINSGSSSIKYQLLDMTNEKVLAKGLVERIGIDGSRIVHKVNGEKHVLEHEIKNHEIGLKLVLDLLTDEKYGVLKDLKEIDAVGHRVVHGGERFASSVKITDEVLKTIETLSFLAPLHNPANIMGIKSSMKLLPGVPQVAVFDTAFHQKMPEKAYLYAIPYEYYEKYKIRRYGFHGTSHRYVSKRAAEIMGKPYDQLKIITVHVGNGASVAAVKNGVSVDTSMGFTPLEGLVMGTRSGDIDPAIVEFLEKEEGLSAKEVVNILNKKSGVYGLTKGFSSDMRDIEDNAIEGDPVCRLAFDVYEYRIAKYIGAYAAAMNGVDAIVFTAGVGENSPIMREEIIENYLGYLGIKIDKEANDFKGEEKIISTPDSKVIAMVVPTNEELMIAKDTKEIIEKGLDELKI

SEQ ID NO: 5 - DNA, 1242 bp, synthetic construct
  misc_feature 1..1242: note = Wild-type acetate kinase
  source 1..1242: mol_type = other DNA
atgcaccatcatcatcatcatggcggtagcggcatgaaagttctggtgattaattctggtagctcctccatcaaatatcagctcatcgaaatggagaaggaagaagtcctgtgcaaaggcattgcggagcgcattggaatcgaaggctcgcgtttagtacatcgtgtgaacgaagagaaacacattattgaagaaaccttgccggatcatgaacgcgccctgaaactggttttagacacgcttgtgaacgagaaactcggtgtcatcaaggatctgaaagaaatcgatgcagttggccaccgcgtagtacatggtggtgaaaagtttaaagaaagtgtgctgattgacgacgaggtgctgaaagcgatcgaagaagtggcgcctctggcaccgcttcacaatcctgctaacttgatgggcattaaagcggcgatgaaattattacccggcgttccgaatgttgccgtgttcgatactgcctttcatcaaaccattccgcagaaggcttacctgtatgcgatcccatacgagtattatgagaagtacaagatccgtcgttatgggttccatggtacatcacaccgctacgtaagcaaacgcgcagcagaaattctgggcaagaaaccggaagaactgaagatcatcacctgtcatattggaaacggtgcttcgattgcggcggtgaaatatgggaaatgcgttgatacgagcatgggctttacccctttggaagggctggtgatgggtactcgtagtggcgatttggacccggccattccgttcttcattatggagaaagaaggcatctctccacaggagatgtacgatatcctgaataagaaaagcggtgtttatgggctctcgaaaggctttagctcagatatgcgcgacattgaagaagccgcactgaaaggtgatgagtggtgtaaactggtgcttgacatttaccactatcgtgttgcgaaatatatcggagcttacgcggcggtaatgaacggtgtggatgccatcgtgtttacggctggagtaggcgaaaactctccgattacccgcgaggacgtttgctcctatctggaatacttgggcgtgaaactggatacaaagaagaatgaagaaaccattcgtgggaaagaaggcatcattagtagtagcgattcgaaagtgaaagttctggtagttcccacgaacgaagagctcatgattgcacgcgacaccaaagagatcgtggagaaattagtacgt

SEQ ID NO: 6 - protein, 414 aa, synthetic construct
  REGION 1..414: note = Wild-type acetate kinase
MHHHHHHGGSGMKVLVINSGSSSIKYQLIEMEKEEVLCKGIAERIGIEGSRLVHRVNEEKHIIEETLPDHERALKLVLDTLVNEKLGVIKDLKEIDAVGHRVVHGGEKFKESVLIDDEVLKAIEEVAPLAPLHNPANLMGIKAAMKLLPGVPNVAVFDTAFHQTIPQKAYLYAIPYEYYEKYKIRRYGFHGTSHRYVSKRAAEILGKKPEELKIITCHIGNGASIAAVKYGKCVDTSMGFTPLEGLVMGTRSGDLDPAIPFFIMEKEGISPQEMYDILNKKSGVYGLSKGFSSDMRDIEEAALKGDEWCKLVLDIYHYRVAKYIGAYAAVMNGVDAIVFTAGVGENSPITREDVCSYLEYLGVKLDTKKNEETIRGKEGIISSSDSKVKVLVVPTNEELMIARDTKEIVEKLVR

SEQ ID NO: 7 - DNA, 1251 bp, synthetic construct
  misc_feature 1..1251: note = Wild-type acetate kinase
  source 1..1251: mol_type = other DNA
atgcaccatcatcatcatcatggcggtagcggcatgattgttctggtagtaaatagtggttcgagctccatcaaatatcagttgctcgatatggacaacgaaaaagtcttatgcaaaggccttgcggagcgcattggtatcccgggcagccgtatcgtccataagaaggccggcgaaaaatttattgttgagaaaccaatgcctaaccacgatgaagcactgaagattgttctggaagtcctgaaagatgagaaactgggagctatcaaggacttcaaagaaattgatgcggttggtcatcgtgtagtacacggcggcgaaaaattttctggttcagtcttaatcgacgacgaagttattaaagccatcgaggaattcagttacttggcaccgctgcataatccgccgaacctgatggggattaaagcgatcatgaaattattaccaggtgtccccaatattggcgtctttgataccgctttccacgccaagatgccggagaaagcgtatctgtacgcgatcccgtatgaattctacgagaagtataagattcgccgctacgggtttcatggaacgagccaccgttacgtttctaaacgcactgccgaaattcttggcctcgattataacaaagcgaagatcgttaccgtacatctggggaatggtgcatcgattgcagccgttaagaacggcaaaagcgtagatacatccatgggatttacccctttggaagggttagtcatgggtacgcgttcaggtgatcttgacccctccatcgtcacctttctcatggagaaagaaggtttgtcggctgaggaggtctatactattctcaacaagaaaagcggtgttcttgggttgagtaagaatttcagctctgatatgcgcgacatcgaagataaagcgctcgaaaacgatccgctctgtcgtcttgttttggacatctatgaataccgcattgccaaatatatcggagcatatgctgcggcgatgaacggtgtagatgccatttcatttacggcaggtgtcggagaaaattcgccgattacccgtgaagaaatctgcgtaaactacctttccttcttggggatcaagattgacaaagagaagaacaacgttaaaggtgaagaacgcattatttctacaccagatagcaaagtcaaggtacttgttgttccgaccaatgaagaattaatgattgcgcgtgatacgaaagaaatcatcgagaaagggctcaaacaattggaatac

SEQ ID NO: 8 - protein, 417 aa, synthetic construct
  REGION 1..417: note = Wild-type acetate kinase
MHHHHHHGGSGMIVLVVNSGSSSIKYQLLDMDNEKVLCKGLAERIGIPGSRIVHKKAGEKFIVEKPMPNHDEALKIVLEVLKDEKLGAIKDFKEIDAVGHRVVHGGEKFSGSVLIDDEVIKAIEEFSYLAPLHNPPNLMGIKAIMKLLPGVPNIGVFDTAFHAKMPEKAYLYAIPYEFYEKYKIRRYGFHGTSHRYVSKRTAEILGLDYNKAKIVTVHLGNGASIAAVKNGKSVDTSMGFTPLEGLVMGTRSGDLDPSIVTFLMEKEGLSAEEVYTILNKKSGVLGLSKNFSSDMRDIEDKALENDPLCRLVLDIYEYRIAKYIGAYAAAMNGVDAISFTAGVGENSPITREEICVNYLSFLGIKIDKEKNNVKGEERIISTPDSKVKVLVVPTNEELMIARDTKEIIEKGLKQLEY

SEQ ID NO: 9 - DNA, 1245 bp, synthetic construct
  misc_feature 1..1245: note = Wild-type acetate kinase
  source 1..1245: mol_type = other DNA
atgcaccatcatcatcatcatggcggtagcggcatgaaagttctggtgattaattctggtagctcctccatcaaatatcagctcatcgaaatggaagatgagcgcgtcctgtgcaagggcattgcggaacgtattggattagaaggcagtcgcttggtacatcgtgttaacgaggagaaacacgtgatcgaaaaagacttgccggatcatgaagaagccctgaaactggtgcttaacaccctggtcgatgaaaaactgggtgtgatcaaggacctcaaagagattgatgcagttggccaccgcgtcgtacatggtggtgagaagtttaaagaatcggtgttcgtgaatgaggaagtcattaaggctatcgaagaagttagtccattagccccgcttcataaccctgcgaatctgatgggcattaaagcagcgatgaaattattacccggcgttccgaacgtagccgtctttgatacggcattccaccaaactattccacagaaagcgtacctctatgctatcccgtacgaatattatgagaaataccgtgtgcgccgctacgggtttcatggaaccagccaccgttatgtgtcaaaacgtgcggcggaaatcttggggaagaaacttgaagagctcaagatcatcacatgtcatattggtaatggtgctagcattgccgccgttaaacacggcaaatgcattgacacctcgatgggctttacgccgttggaagggttagtgatgggtacccgctctggcgatcttgacccggcgattcccttcttcatcatggagaaagaaggcatctcacctcaggaaatgtatgatatcctcaacaagaagagcggtgtatacggcttgtcgaaaggatttagcagcgatatgcgtgacattgaagaagccgcacttaaaggtgatgagtggtgtaaactcattttggacatctatcattaccgcattgcgaaatatattggcgcatatgctgctgcgatgaatggtgtcgatgccatcgtgtttactgcaggcgttggagaaaactctccgattacgcgtggcgatgtgtgctcctaccttgaattcctcggtgtgaagttggacaaacaaaagaacgaagaaaccattcgcgggaaagaggggatcatcagtacaccagattcgcgtgtcaaggtgttagttgtaccgaccaatgaggagcttatgattgcgcgcgacacgaaagaaattgttgaacgtttgggcaaacgt

SEQ ID NO: 10 - protein, 415 aa, synthetic construct
  REGION 1..415: note = Wild-type acetate kinase
MHHHHHHGGSGMKVLVINSGSSSIKYQLIEMEDERVLCKGIAERIGLEGSRLVHRVNEEKHVIEKDLPDHEEALKLVLNTLVDEKLGVIKDLKEIDAVGHRVVHGGEKFKESVFVNEEVIKAIEEVSPLAPLHNPANLMGIKAAMKLLPGVPNVAVFDTAFHQTIPQKAYLYAIPYEYYEKYRVRRYGFHGTSHRYVSKRAAEILGKKLEELKIITCHIGNGASIAAVKHGKCIDTSMGFTPLEGLVMGTRSGDLDPAIPFFIMEKEGISPQEMYDILNKKSGVYGLSKGFSSDMRDIEEAALKGDEWCKLILDIYHYRIAKYIGAYAAAMNGVDAIVFTAGVGENSPITRGDVCSYLEFLGVKLDKQKNEETIRGKEGIISTPDSRVKVLVVPTNEELMIARDTKEIVERLGKR

SEQ ID NO: 11 - DNA, 1251 bp, synthetic construct
  misc_feature 1..1251: note = Wild-type acetate kinase
  source 1..1251: mol_type = other DNA
atgcaccatcatcatcatcatggcggtagcggcatgattgttctggtagtaaatagtggttcgagctccatcaaatatcagttgctcgatatggacaacgaaaaagtcttatgcaaaggccttgcggagcgcattggtatcccgggcagccgtatcgtccataagaaggatggcgaaaaatttgttattgaacacccaatggccaaccatgatgaagcactgcaactggttttgcagaccctgaaagacgagaagatgggagcgatcaaagacttcaaagaaattgatgctgtaggtcaccgcgtcgtccatggcggcgagaaattttctggctcagttctgattgatgatgaagttatcaatgccattgaagaattcagttacttagcaccgcttcacaaccctcctaatctgatgggtatcaaagcgattatgaaactgttacccggagtaccaaacgtcgccgtatttgacacggctttccatgcgaagatgcccaagaaagcctatctctacgcgattccatatgagtactacgagaagtataagatccgtcgttatggttttcatggtacttctcaccgctatgttagccgtcgtaccgcagaaattttgggcctcgattacaacaaatcgaagatcatcacagtccatcttggaaatggtgcttccattgcagccgttatgaacggcaaaagcgtagacacgtcaatgggctttacccctttggaaggtttagttatgggtactcgctctggcgatttagatcccagcatcgtcaccttcctcattgagaaagaaggactttcgccagaagaagtctatacgatcctcaataagaaaagtggcgttttgggtctcacctccaactttagctcagatatgcgcgacattgaagataaagcgcttgagaacgaccctttgtgtcgcctcgtccttgatatttacgaatatcgtatcgcgaaatatattggcgcatatgtagctgccatgaacggtgttgatgcgattagcttcacagcaggcgtaggagaaaattctccaattacccgcgaagaaatctgcgagaattacttgtcctaccttggcatcaagatcgacaaagagaagaacaacgtcaaaggtgaagagcgtattatttctactcccgatagcaaggttaaggttctcattgttccaacgaatgaagagttgatgattgcccgcgacaccaaagaaatcatcgagaaaggcatcaagaaattagaatac

SEQ ID NO: 12 - protein, 417 aa, synthetic construct
  REGION 1..417: note = Wild-type acetate kinase
MHHHHHHGGSGMIVLVVNSGSSSIKYQLLDMDNEKVLCKGLAERIGIPGSRIVHKKDGEKFVIEHPMANHDEALQLVLQTLKDEKMGAIKDFKEIDAVGHRVVHGGEKFSGSVLIDDEVINAIEEFSYLAPLHNPPNLMGIKAIMKLLPGVPNVAVFDTAFHAKMPKKAYLYAIPYEYYEKYKIRRYGFHGTSHRYVSRRTAEILGLDYNKSKIITVHLGNGASIAAVMNGKSVDTSMGFTPLEGLVMGTRSGDLDPSIVTFLIEKEGLSPEEVYTILNKKSGVLGLTSNFSSDMRDIEDKALENDPLCRLVLDIYEYRIAKYIGAYVAAMNGVDAISFTAGVGENSPITREEICENYLSYLGIKIDKEKNNVKGEERIISTPDSKVKVLIVPTNEELMIARDTKEIIEKGIKKLEY

SEQ ID NO: 13 - DNA, 1251 bp, synthetic construct
  misc_feature 1..1251: note = Variant of acetate kinase
  source 1..1251: mol_type = other DNA
atgcaccatcatcatcatcatggcggtagcggcatgaaagttctggtgattaattctggtagctcctccatcaaatatcagctcctcgatatgaccaacgaaaaggtattagcgaaaggcttggtcgagcgcattggcatcgacggttcgcgtatcgtgcataaagttaacggcgaaaaacacgtgctggaacatgagattaagaatcacgaaattggacttaaattggtcctggatcttcttacggacgaaaaatacggtgtgttgaaggatctcaaagaaatcgatgcatgggggcatcgcgtagtacatggcggcgagcgttttgccagtagcgtgaagattactgacgaagtcttaaagaccatcgagacgttgtcgttcttagctccgttacacaatccagcgaacattatgggtatcaagagcagcatgaaattattaccgggtgtgcctcaagttgccgtctttgatacagcgttccaccagaagatgccggagaaagcctatttgtacgcaatcccctatgagtactacgagaaatataaaattcgccgctatgggtttcatggaacctcacatcgttatgtgagtaaacgtgctgcggaaattatgggcaaaccgtacgatcagctcaagatcattaccgttcacgtgggtaacggcgcatcagttgcggcggtgaagaatggcgtatctgttgacacttccatgggtttcacaccacttgaaggtcttgtcatgggcacgcgcagcggcgatattgatccggccatcgtggaatttcttgagaaagaagaaggattgtcggccaaagaagtcgtcaacatcctcaacaagaaatctggtgtgtatgggctcaccaaaggctttagtagtgacatgcgtgacattgaagataatgctattgaaggtgatcctgtatgccgccttgcattcgatgtgtacgaatatcgtatcgcgaaatatattggcgcatacgctgcggccatgaacggtgttgacgcgatcgtctttaccgcaggagttggcgaaaatagcccgattatgcgcgaagaaattattgagaactacttgggctacttagggatcaagatcgataaagaagccaatgacttcaaaggtgaggagaagatcatttcaacgcccgattccaaagtgattgcgatggtagttccgaccaacgaggagctcatgatcgccaaagacacgaaagaaatcattgagaaagggttggacgagcttaagatc

SEQ ID NO: 14 - protein, 417 aa, synthetic construct
  REGION 1..417: note = Variant of acetate kinase
MHHHHHHGGSGMKVLVINSGSSSIKYQLLDMTNEKVLAKGLVERIGIDGSRIVHKVNGEKHVLEHEIKNHEIGLKLVLDLLTDEKYGVLKDLKEIDAWGHRVVHGGERFASSVKITDEVLKTIETLSFLAPLHNPANIMGIKSSMKLLPGVPQVAVFDTAFHQKMPEKAYLYAIPYEYYEKYKIRRYGFHGTSHRYVSKRAAEIMGKPYDQLKIITVHVGNGASVAAVKNGVSVDTSMGFTPLEGLVMGTRSGDIDPAIVEFLEKEEGLSAKEVVNILNKKSGVYGLTKGFSSDMRDIEDNAIEGDPVCRLAFDVYEYRIAKYIGAYAAAMNGVDAIVFTAGVGENSPIMREEIIENYLGYLGIKIDKEANDFKGEEKIISTPDSKVIAMVVPTNEELMIAKDTKEIIEKGLDELKI

SEQ ID NO: 15 - DNA, 1251 bp, synthetic construct
  misc_feature 1..1251: note = Variant of acetate kinase
  source 1..1251: mol_type = other DNA
atgcaccatcatcatcatcatggcggtagcggcatgaaagttctggtgattaattctggtagctcctccatcaaatatcagctcctcgatatgaccaacgaaaaggtattagcgaaaggcttggtcgagcgcattggcatcgacggttcgcgtatcgtgcataaagttaacggcgaaaaacacgtgctggaacatgagattaagaatcacgaaattggacttaaattggtcctggatcttcttacggacgaaaaatacggtgtgttgaaggatctcaaagaaatcgatgcagttgggcatcgcgtagtacatggcggcgagcgttttgccagtagcgtgaagattactgacgaagtcttaaagaccatcgagacgttgtcgttcttagctccgttacacaatccagcgaacattatgggtatcaagagcagcatgaaattattaccgggtgtgcctcaagttgccgtctttgatacagcgttccaccagaagatgccggagaaagcctatttgtacgcaatcccctatgagtactacgagaaatataaaattcgccgctatgggtttcatggaacctcacatcgttatgtgagtaaacgtgctgcggaaattatgggcaaaccgtacgatcagctcaagatcattaccgttcacgtgggtaacggcgcatcagttgcggcggtgaagaatggcgtatctgttgacacttccatgggtttcacaccacttgaaggtcttgtcatgggcacgcgcagcggcgatattgatccggccatcgtggaatttcttgagaaagaagaaggattgtcggccaaagaagtcgtcaacatcctcaacaagaaatctggtgtgtatgggctcaccaaaggctttagtagtgacatgcgtgacattgaagataatgctattgaaggtgatcctgtatgccgccttgcattcgatgtgtacgaatatcgtatcgcgaaatatattggcgcatacgctgcggccatgaacggtgttgacgcgatcgtctttaccgcaggagttggcgaaaatagcccgattatgcgcgaagaaattattgagaactacttgggctacttagggatcaagatcgataaagaagccaatgacttcaaaggtgaggagaagatcatttcaacgcccgattccaaagtgattgcgatggtagttccgaccaacgaggagctcatgatcgccaaagacatgaaagaaatcattgagaaagggttggacgagcttaagatc

SEQ ID NO: 16 - protein, 417 aa, synthetic construct
  REGION 1..417: note = Variant of acetate kinase
MHHHHHHGGSGMKVLVINSGSSSIKYQLLDMTNEKVLAKGLVERIGIDGSRIVHKVNGEKHVLEHEIKNHEIGLKLVLDLLTDEKYGVLKDLKEIDAVGHRVVHGGERFASSVKITDEVLKTIETLSFLAPLHNPANIMGIKSSMKLLPGVPQVAVFDTAFHQKMPEKAYLYAIPYEYYEKYKIRRYGFHGTSHRYVSKRAAEIMGKPYDQLKIITVHVGNGASVAAVKNGVSVDTSMGFTPLEGLVMGTRSGDIDPAIVEFLEKEEGLSAKEVVNILNKKSGVYGLTKGFSSDMRDIEDNAIEGDPVCRLAFDVYEYRIAKYIGAYAAAMNGVDAIVFTAGVGENSPIMREEIIENYLGYLGIKIDKEANDFKGEEKIISTPDSKVIAMVVPTNEELMIAKDMKEIIEKGLDELKI

SEQ ID NO: 17 - DNA, 1251 bp, synthetic construct
  misc_feature 1..1251: note = Variant of acetate kinase
  source 1..1251: mol_type = other DNA
atgcaccatcatcatcatcatggcggtagcggcatgaaagttctggtgattaattctggtagctcctccatcaaatatcagctcctcgatatgaccaacgaaaaggtattagcgaaaggcttggtcgagcgcattggcatcgacggttcgcgtatcgtgcataaagttaacggcgaaaaacacgtgctggaacatgagattaagaatcacgaaattggacttaaattggtcctggatcttcttacggacgaaaaatacggtgtgttgaaggatctcaaagaaatcgatgcagttgggcatcgcgtagtacatggcggcgagcgttttgccagtagcgtgaagattactgacgaagtcttaaagaccatcgagacgttgtcgttcttagctccgttacacaatccagcgtttattatgggtatcaagagcatcatgaaattattaccgggtgtgcctcaagttgccgtctttgatacagcgttccaccagaagatgccggagaaagcctatttgtacgcaatcccctatgagtactacgagaaatataaaattcgccgctatgggtttcatggaacctcacatcgttatgtgagtaaacgtgctgcggaaattatgggcaaaccgtacgatcagctcaagatcattaccgttcacgtgggtaacggcgcatcagttgcggcggtgaagaatggcgtatctgttgacacttccatgggtttcacaccacttgaaggtcttgtcatgggcacgcgcagcggcgatattgatccggccatcgtggaatttcttgagaaagaagaaggattgtcggccaaagaagtcgtcaacatcctcaacaagaaatctggtgtgtatgggctcaccaaaggctttagtagtgacatgcgtgacattgaagataatgctattgaaggtgatcctgtatgccgccttgcattcgatgtgtacgaatatcgtatcgcgaaatatattggcgcatacgctgcggccatgaacggtgttgacgcgatcgtctttaccgcaggagttggcgaaaatagcccgattatgcgcgaagaaattattgagaactacttgggctacttagggatcaagatcgataaagaagccaatgacttcaaaggtgaggagaagatcatttcaacgcccgattccaaagtgattgcgatggtagttccgaccaacgaggagctcatgatcgccaaagacacgaaagaaatcattgagaaagggttggacgagcttaagatc

SEQ ID NO: 18 - protein, 417 aa, synthetic construct
  REGION 1..417: note = Variant of acetate kinase
MHHHHHHGGSGMKVLVINSGSSSIKYQLLDMTNEKVLAKGLVERIGIDGSRIVHKVNGEKHVLEHEIKNHEIGLKLVLDLLTDEKYGVLKDLKEIDAVGHRVVHGGERFASSVKITDEVLKTIETLSFLAPLHNPAFIMGIKSIMKLLPGVPQVAVFDTAFHQKMPEKAYLYAIPYEYYEKYKIRRYGFHGTSHRYVSKRAAEIMGKPYDQLKIITVHVGNGASVAAVKNGVSVDTSMGFTPLEGLVMGTRSGDIDPAIVEFLEKEEGLSAKEVVNILNKKSGVYGLTKGFSSDMRDIEDNAIEGDPVCRLAFDVYEYRIAKYIGAYAAAMNGVDAIVFTAGVGENSPIMREEIIENYLGYLGIKIDKEANDFKGEEKIISTPDSKVIAMVVPTNEELMIAKDTKEIIEKGLDELKI

SEQ ID NO: 19 - DNA, 1251 bp, synthetic construct
  misc_feature 1..1251: note = Variant of acetate kinase
  source 1..1251: mol_type = other DNA
atgcaccatcatcatcatcatggcggtagcggcatgaaagttctggtgattaattctggtagctcctccatcaaatatcagctcctcgatatgaccaacgaaaaggtattagcgaaaggcttggtcgagcgcattggcatcgacggttcgcgtatcgtgcataaagttaacggcgaaaaacacgtgctggaacatgagattaagaatcacgaaattggacttaaattggtcctggatcttcttacggacgaaaaatacggtgtgttgaaggatctcaaagaaatcgatgcaatggggcatcgcgtagtacatggcggcgagcgttttgccagtagcgtgaagattactgacgaagtcttaaagaccatcgagacgttgtcgttcttagctccgttacacaatccagcgaacattatgggtatcaagagcagcatgaaattattaccgggtgtgcctcaagttgccgtctttgatacagcgttccaccagaagatgccggagaaagcctatttgtacgcaatcccctatgagtactacgagaaatataaaattcgccgctatgggtttcatggaacctcacatcgttatgtgagtaaacgtgctgcggaaattatgggcaaaccgtacgatcagctcaagatcattaccgttcacgtgggtaacggcgcatcagttgcggcggtgaagaatggcgtatctgttgacacttccatgggtttcacaccacttgaaggtcttgtcatgggcacgcgcagcggcgatattgatccggccatcgtggaatttcttgagaaagaagaaggattgtcggccaaagaagtcgtcaacatcctcaacaagaaatctggtgtgtatgggctcaccaaaggctttagtagtgacatgcgtgacattgaagataatgctattgaaggtgatcctgtatgccgccttgcattcgatgtgtacgaatatcgtatcgcgaaatatattggcgcatacgctgcggccatgaacggtgttgacgcgatcgtctttaccgcaggagttggcgaaaatagcccgattatgcgcgaagaaattattgagaactacttgggctacttagggatcaagatcgataaagaagccaatgacttcaaaggtgaggagaagatcatttcaacgcccgattccaaagtgattgcgatggtagttccgaccaacgaggagctcatgatcgccaaagacacgaaagaaatcattgagaaagggttggacgagcttaagatc

SEQ ID NO: 20 - protein, 417 aa, synthetic construct
  REGION 1..417: note = Variant of acetate kinase
MHHHHHHGGSGMKVLVINSGSSSIKYQLLDMTNEKVLAKGLVERIGIDGSRIVHKVNGEKHVLEHEIKNHEIGLKLVLDLLTDEKYGVLKDLKEIDAMGHRVVHGGERFASSVKITDEVLKTIETLSFLAPLHNPANIMGIKSSMKLLPGVPQVAVFDTAFHQKMPEKAYLYAIPYEYYEKYKIRRYGFHGTSHRYVSKRAAEIMGKPYDQLKIITVHVGNGASVAAVKNGVSVDTSMGFTPLEGLVMGTRSGDIDPAIVEFLEKEEGLSAKEVVNILNKKSGVYGLTKGFSSDMRDIEDNAIEGDPVCRLAFDVYEYRIAKYIGAYAAAMNGVDAIVFTAGVGENSPIMREEIIENYLGYLGIKIDKEANDFKGEEKIISTPDSKVIAMVVPTNEELMIAKDTKEIIEKGLDELKI

SEQ ID NO: 21 - DNA, 1251 bp, synthetic construct
  misc_feature 1..1251: note = Variant of acetate kinase
  source 1..1251: mol_type = other DNA
atgcaccatcatcatcatcatggcggtagcggcatgaaagttctggtgattaattctggtagctcctccatcaaatatcagctcctcgatatgaccaacgaaaaggtattagcgaaaggcttggtcgagcgcattggcatcgacggttcgcgtatcgtgcataaagttaacggcgaaaaacacgtgctggaacatgagattaagaatcacgaaattggacttaaattgggtctggatcttcttacggacgaaaaatacggtgtgttgaaggatctcaaagaaatcgatgcagttgggcatcgcgtagtacatggcggcgagcgttttgccagtagcgtgaagattactgacgaagtcttaaagaccatcgagacgttgtcgttcttagctccgttacacaatccagcgaacattatgggtatcaagagcagcatgaaattattaccgggtgtgcctcaagttgccgtctttgatacagcgttccaccagaagatgccggagaaagcctatttgtacgcaatcccctatgagtactacgagaaatataaaattcgccgctatgggtttcatggaacctcacatcgttatgtgagtaaacgtgctgcggaaattatgggcaaaccgtacgatcagctcaagatcattaccgttcacgtgggtaacggcgcatcagttgcggcggtgaagaatggcgtatctgttgacacttccatgggtttcacaccacttgaaggtcttgtcatgggcacgcgcagcggcgatattgatccggccatcgtggaatttcttgagaaagaagaaggattgtcggccaaagaagtcgtcaacatcctcaacaagaaatctggtgtgtatgggctcaccaaaggctttagtagtgacatgcgtgacattgaagataatgctattgaaggtgatcctgtatgccgccttgcattcgatgtgtacgaatatcgtatcgcgaaatatattggcgcatacgctgcggccatgaacggtgttgacgcgatcgtctttaccgcaggagttggcgaaaatagcccgattatgcgcgaagaaattattgagaactacttgggctacttagggatcaagatcgataaagaagccaatgacttcaaaggtgaggagaagatcatttcaacgcccgattccaaagtgattgcgatggtagttccgaccaacgaggagctcatgatcgccaaagacacgaaagaaatcattgagaaagggttggacgagcttaagatc

SEQ ID NO: 22 - protein, 417 aa, synthetic construct
  REGION 1..417: note = Variant of acetate kinase
MHHHHHHGGSGMKVLVINSGSSSIKYQLLDMTNEKVLAKGLVERIGIDGSRIVHKVNGEKHVLEHEIKNHEIGLKLGLDLLTDEKYGVLKDLKEIDAVGHRVVHGGERFASSVKITDEVLKTIETLSFLAPLHNPANIMGIKSSMKLLPGVPQVAVFDTAFHQKMPEKAYLYAIPYEYYEKYKIRRYGFHGTSHRYVSKRAAEIMGKPYDQLKIITVHVGNGASVAAVKNGVSVDTSMGFTPLEGLVMGTRSGDIDPAIVEFLEKEEGLSAKEVVNILNKKSGVYGLTKGFSSDMRDIEDNAIEGDPVCRLAFDVYEYRIAKYIGAYAAAMNGVDAIVFTAGVGENSPIMREEIIENYLGYLGIKIDKEANDFKGEEKIISTPDSKVIAMVVPTNEELMIAKDTKEIIEKGLDELKI

SEQ ID NO: 23 - DNA, 1251 bp, synthetic construct
  misc_feature 1..1251: note = Variant of acetate kinase
  source 1..1251: mol_type = other DNA
atgcaccatcatcatcatcatggcggtagcggcatgaaagttctggtgattaattctggtagctcctccatcaaatatcagctcctcgatatgaccaacgaaaaggtattagcgaaaggcttggtcgagcgcattggcatcgacggttcgcgtatcgtgcataaagttaacggcgaaaaacacgtgctggaacatgagattaagaatcacgaaattggactttttttggtcctggatcttcttacggacgaaaaatacggtgtgttgaaggatctcaaagaaatcgatgcagttgggcatcgcgtagtacatggcggcgagcgttttgccagtagcgtgaagattactgacgaagtcttaaagaccatcgagacgttgtcgttcttagctccgttacacaatccagcgaacattatgggtatcaagagcagcatgaaattattaccgggtgtgcctcaagttgccgtctttgatacagcgttccaccagaagatgccggagaaagcctatttgtacgcaatcccctatgagtactacgagaaatataaaattcgccgctatgggtttcatggaacctcacatcgttatgtgagtaaacgtgctgcggaaattatgggcaaaccgtacgatcagctcaagatcattaccgttcacgtgggtaacggcgcatcagttgcggcggtgaagaatggcgtatctgttgacacttccatgggtttcacaccacttgaaggtcttgtcatgggcacgcgcagcggcgatattgatccggccatcgtggaatttcttgagaaagaagaaggattgtcggccaaagaagtcgtcaacatcctcaacaagaaatctggtgtgtatgggctcaccaaaggctttagtagtgacatgcgtgacattgaagataatgctattgaaggtgatcctgtatgccgccttgcattcgatgtgtacgaatatcgtatcgcgaaatatattggcgcatacgctgcggccatgaacggtgttgacgcgatcgtctttaccgcaggagttggcgaaaatagcccgattatgcgcgaagaaattattgagaactacttgggctacttagggatcaagatcgataaagaagccaatgacttcaaaggtgaggagaagatcatttcaacgcccgattccaaagtgattgcgatggtagttccgaccaacgaggagctcatgatcgccaaagacacgaaagaaatcattgagaaagggttggacgagcttaagatc

SEQ ID NO: 24 - protein, 417 aa, synthetic construct
  REGION 1..417: note = Variant of acetate kinase
MHHHHHHGGSGMKVLVINSGSSSIKYQLLDMTNEKVLAKGLVERIGIDGSRIVHKVNGEKHVLEHEIKNHEIGLFLVLDLLTDEKYGVLKDLKEIDAVGHRVVHGGERFASSVKITDEVLKTIETLSFLAPLHNPANIMGIKSSMKLLPGVPQVAVFDTAFHQKMPEKAYLYAIPYEYYEKYKIRRYGFHGTSHRYVSKRAAEIMGKPYDQLKIITVHVGNGASVAAVKNGVSVDTSMGFTPLEGLVMGTRSGDIDPAIVEFLEKEEGLSAKEVVNILNKKSGVYGLTKGFSSDMRDIEDNAIEGDPVCRLAFDVYEYRIAKYIGAYAAAMNGVDAIVFTAGVGENSPIMREEIIENYLGYLGIKIDKEANDFKGEEKIISTPDSKVIAMVVPTNEELMIAKDTKEIIEKGLDELKI

SEQ ID NO: 25 - DNA, 1251 bp, synthetic construct
  misc_feature 1..1251: note = Variant of acetate kinase
  source 1..1251: mol_type = other DNA
atgcaccatcatcatcatcatggcggtagcggcatgaaagttctggtgattaattctggtagctcctccatcaaatatcagctcctcgatatgaccaacgaaaaggtattagcgaaaggcttggtcgagcgcattggcatcgacggttcgcgtatcgtgcataaagttaacggcgaaaaacacgtgctggaacatgagattaagaatcacgaaattggacttaaattggtcctggatcttcttacggacgaaaaatacggtgtgttgaaggatctcaaagaaatcgatgcagttgggcatcgcgtagtacatggcggcgagcgttttgccagtagcgtgaagtctactgacgaagtcttaaagaccatcgagacgttgtcgttcttagctccgttacacaatccagcgaacattatgggtatcaagagcagcatgaaattattaccgggtgtgcctcaagttgccgtctttgatacagcgttccaccagaagatgccggagaaagcctatttgtacgcaatcccctatgagtactacgagaaatataaaattcgccgctatgggtttcatggaacctcacatcgttatgtgagtaaacgtgctgcggaaattatgggcaaaccgtacgatcagctcaagatcattaccgttcacgtgggtaacggcgcatcagttgcggcggtgaagaatggcgtatctgttgacacttccatgggtttcacaccacttgaaggtcttgtcatgggcacgcgcagcggcgatattgatccggccatcgtggaatttcttgagaaagaagaaggattgtcggccaaagaagtcgtcaacatcctcaacaagaaatctggtgtgtatgggctcaccaaaggctttagtagtgacatgcgtgacattgaagataatgctattgaaggtgatcctgtatgccgccttgcattcgatgtgtacgaatatcgtatcgcgaaatatattggcgcatacgctgcggccatgaacggtgttgacgcgatcgtctttaccgcaggagttggcgaaaatagcccgattatgcgcgaagaaattattgagaactacttgggctacttagggatcaagatcgataaagaagccaatgacttcaaaggtgaggagaagatcatttcaacgcccgattccaaagtgattgcgatggtagttccgaccaacgaggagctcatgatcgccaaagacacgaaagaaatcattgagaaagggttggacgagcttaagatc

SEQ ID NO: 26 - protein, 417 aa, synthetic construct
  REGION 1..417: note = Variant of acetate kinase
MHHHHHHGGSGMKVLVINSGSSSIKYQLLDMTNEKVLAKGLVERIGIDGSRIVHKVNGEKHVLEHEIKNHEIGLKLVLDLLTDEKYGVLKDLKEIDAVGHRVVHGGERFASSVKSTDEVLKTIETLSFLAPLHNPANIMGIKSSMKLLPGVPQVAVFDTAFHQKMPEKAYLYAIPYEYYEKYKIRRYGFHGTSHRYVSKRAAEIMGKPYDQLKIITVHVGNGASVAAVKNGVSVDTSMGFTPLEGLVMGTRSGDIDPAIVEFLEKEEGLSAKEVVNILNKKSGVYGLTKGFSSDMRDIEDNAIEGDPVCRLAFDVYEYRIAKYIGAYAAAMNGVDAIVFTAGVGENSPIMREEIIENYLGYLGIKIDKEANDFKGEEKIISTPDSKVIAMVVPTNEELMIAKDTKEIIEKGLDELKI

SEQ ID NO: 27 - DNA, 1251 bp, synthetic construct
  misc_feature 1..1251: note = Variant of acetate kinase
  source 1..1251: mol_type = other DNA
atgcaccatcatcatcatcatggcggtagcggcatgaaagttctggtgattaattctggtagctcctccatcaaatatcagctcctcgatatgaccaacgaaaaggtattagcgaaaggcttggtcgagcgcattggcatcgacggttcgcgtatcgtgcataaagttaacggcgaaaaacacgtgctggaacatgagattaagaatcacgaaattggactttggttggtcctggatcttcttacggacgaaaaatacggtgtgttgaaggatctcaaagaaatcgatgcagttgggcatcgcgtagtacatggcggcgagcgttttgccagtagcgtgaagattactgacgaagtcttaaagaccatcgagacgttgtcgttcttagctccgttacacaatccagcgaacattatgggtatcaagagcagcatgaaattattaccgggtgtgcctcaagttgccgtctttgatacagcgttccaccagaagatgccggagaaagcctatttgtacgcaatcccctatgagtactacgagaaatataaaattcgccgctatgggtttcatggaacctcacatcgttatgtgagtaaacgtgctgcggaaattatgggcaaaccgtacgatcagctcaagatcattaccgttcacgtgggtaacggcgcatcagttgcggcggtgaagaatggcgtatctgttgacacttccatgggtttcacaccacttgaaggtcttgtcatgggcacgcgcagcggcgatattgatccggccatcgtggaatttcttgagaaagaagaaggattgtcggccaaagaagtcgtcaacatcctcaacaagaaatctggtgtgtatgggctcaccaaaggctttagtagtgacatgcgtgacattgaagataatgctattgaaggtgatcctgtatgccgccttgcattcgatgtgtacgaatatcgtatcgcgaaatatattggcgcatacgctgcggccatgaacggtgttgacgcgatcgtctttaccgcaggagttggcgaaaatagcccgattatgcgcgaagaaattattgagaactacttgggctacttagggatcaagatcgataaagaagccaatgacttcaaaggtgaggagaagatcatttcaacgcccgattccaaagtgattgcgatggtagttccgaccaacgaggagctcatgatcgccaaagacacgaaagaaatcattgagaaagggttggacgagcttaagatc

SEQ ID NO: 28 - protein, 417 aa, synthetic construct
  REGION 1..417: note = Variant of acetate kinase
MHHHHHHGGSGMKVLVINSGSSSIKYQLLDMTNEKVLAKGLVERIGIDGSRIVHKVNGEKHVLEHEIKNHEIGLWLVLDLLTDEKYGVLKDLKEIDAVGHRVVHGGERFASSVKITDEVLKTIETLSFLAPLHNPANIMGIKSSMKLLPGVPQVAVFDTAFHQKMPEKAYLYAIPYEYYEKYKIRRYGFHGTSHRYVSKRAAEIMGKPYDQLKIITVHVGNGASVAAVKNGVSVDTSMGFTPLEGLVMGTRSGDIDPAIVEFLEKEEGLSAKEVVNILNKKSGVYGLTKGFSSDMRDIEDNAIEGDPVCRLAFDVYEYRIAKYIGAYAAAMNGVDAIVFTAGVGENSPIMREEIIENYLGYLGIKIDKEANDFKGEEKIISTPDSKVIAMVVPTNEELMIAKDTKEIIEKGLDELKI

SEQ ID NO: 29 - DNA, 1251 bp, synthetic construct
  misc_feature 1..1251: note = Variant of acetate kinase
  source 1..1251: mol_type = other DNA
atgcaccatcatcatcatcatggcggtagcggcatgaaagttctggtgattaattctggtagctcctccatcaaatatcagctcctcgatatgaccaacgaaaaggtattagcgaaaggcttggtcgagcgcattggcatcgacggttcgcgtatcgtgcataaagttaacggcgaaaaacacgtgctggaacatgagattaagaatcacgaaattggacttaaattggtcctggatcttcttacggacgaaaaatacggtgtgttgaaggatctcaaagaaatcgatgcagttgggcatcgcgtagtacatggcggcgagcgttttgccagtagcgtgaagattactgacgaagtcttaaagaccatcgagacgttgtcgttcttagctccgttacacaatccaattaacattatgggtatcaagagcagcatgaaattattaccgggtgtgcctcaagttgccgtctttgatacagcgttccaccagaagatgccggagaaagcctatttgtacgcaatcccctatgagtactacgagaaatataaaattcgccgctatgggtttcatggaacctcacatcgttatgtgagtaaacgtgctgcggaaattatgggcaaaccgtacgatcagctcaagatcattaccgttcacgtgggtaacggcgcatcagttgcggcggtgaagaatggcgtatctgttgacacttccatgggtttcacaccacttgaaggtcttgtcatgggcacgcgcagcggcgatattgatccggccatcgtggaatttcttgagaaagaagaaggattgtcggccaaagaagtcgtcaacatcctcaacaagaaatctggtgtgtatgggctcaccaaaggctttagtagtgacatgcgtgacattgaagataatgctattgaaggtgatcctgtatgccgccttgcattcgatgtgtacgaatatcgtatcgcgaaatatattggcgcatacgctgcggccatgaacggtgttgacgcgatcgtctttaccgcaggagttggcgaaaatagcccgattatgcgcgaagaaattattgagaactacttgggctacttagggatcaagatcgataaagaagccaatgacttcaaaggtgaggagaagatcatttcaacgcccgattccaaagtgattgcgatggtagttccgaccaacgaggagctcatgatcgccaaagacacgaaagaaatcattgagaaagggttggacgagcttaagatc

SEQ ID NO: 30 - protein, 417 aa, synthetic construct
  REGION 1..417: note = Variant of acetate kinase
MHHHHHHGGSGMKVLVINSGSSSIKYQLLDMTNEKVLAKGLVERIGIDGSRIVHKVNGEKHVLEHEIKNHEIGLKLVLDLLTDEKYGVLKDLKEIDAVGHRVVHGGERFASSVKITDEVLKTIETLSFLAPLHNPINIMGIKSSMKLLPGVPQVAVFDTAFHQKMPEKAYLYAIPYEYYEKYKIRRYGFHGTSHRYVSKRAAEIMGKPYDQLKIITVHVGNGASVAAVKNGVSVDTSMGFTPLEGLVMGTRSGDIDPAIVEFLEKEEGLSAKEVVNILNKKSGVYGLTKGFSSDMRDIEDNAIEGDPVCRLAFDVYEYRIAKYIGAYAAAMNGVDAIVFTAGVGENSPIMREEIIENYLGYLGIKIDKEANDFKGEEKIISTPDSKVIAMVVPTNEELMIAKDTKEIIEKGLDELKI

SEQ ID NO: 31 - DNA, 1251 bp, synthetic construct
  misc_feature 1..1251: note = Variant of acetate kinase
  source 1..1251: mol_type = other DNA
atgcaccatcatcatcatcatggcggtagcggcatgaaagttctggtgattaattctggtagctcctccatcaaatatcagctcctcgatatgaccaacgaaaaggtattagcgaaaggcttggtcgagcgcattggcatcgacggttcgcgtatcgtgcataaagttaacggcgaaaaacacgtgctggaacatgagattaagaatcacgaaattggacttaaattggtcctggatcttcttacggacgaaaaatacggtgtgttgaaggatctcaaagaaatcgatgcagttgggcatcgcgtagtacatggcggcgagcgttttgccagtagcgtgaagattactgacgaagtcttaaagaccatcgagacgttgtcgttcttagctccgttacacaatccagcgaacattatgggtatcaagagcagcatgaaagtgttaccgggtgtgcctcaagttgccgtctttgatacagcgttccaccagaagatgccggagaaagcctatttgtacgcaatcccctatgagtactacgagaaatataaaattcgccgctatgggtttcatggaacctcacatcgttatgtgagtaaacgtgctgcggaaattatgggcaaaccgtacgatcagctcaagatcattaccgttcacgtgggtaacggcgcatcagttgcggcggtgaagaatggcgtatctgttgacacttccatgggtttcacaccacttgaaggtcttgtcatgggcacgcgcagcggcgatattgatccggccatcgtggaatttcttgagaaagaagaaggattgtcggccaaagaagtcgtcaacatcctcaacaagaaatctggtgtgtatgggctcaccaaaggctttagtagtgacatgcgtgacattgaagataatgctattgaaggtgatcctgtatgccgccttgcattcgatgtgtacgaatatcgtatcgcgaaatatattggcgcatacgctgcggccatgaacggtgttgacgcgatcgtctttaccgcaggagttggcgaaaatagcccgattatgcgcgaagaaattattgagaactacttgggctacttagggatcaagatcgataaagaagccaatgacttcaaaggtgaggagaagatcatttcaacgcccgattccaaagtgattgcgatggtagttccgaccaacgaggagctcatgatcgccaaagacacgaaagaaatcattgagaaagggttggacgagcttaagatc

SEQ ID NO: 32 - protein, 417 aa, synthetic construct
  REGION 1..417: note = Variant of acetate kinase
MHHHHHHGGSGMKVLVINSGSSSIKYQLLDMTNEKVLAKGLVERIGIDGSRIVHKVNGEKHVLEHEIKNHEIGLKLVLDLLTDEKYGVLKDLKEIDAVGHRVVHGGERFASSVKITDEVLKTIETLSFLAPLHNPANIMGIKSSMKVLPGVPQVAVFDTAFHQKMPEKAYLYAIPYEYYEKYKIRRYGFHGTSHRYVSKRAAEIMGKPYDQLKIITVHVGNGASVAAVKNGVSVDTSMGFTPLEGLVMGTRSGDIDPAIVEFLEKEEGLSAKEVVNILNKKSGVYGLTKGFSSDMRDIEDNAIEGDPVCRLAFDVYEYRIAKYIGAYAAAMNGVDAIVFTAGVGENSPIMREEIIENYLGYLGIKIDKEANDFKGEEKIISTPDSKVIAMVVPTNEELMIAKDTKEIIEKGLDELKI

SEQ ID NO: 33 - DNA, 1251 bp, synthetic construct
  misc_feature 1..1251: note = Variant of acetate kinase
  source 1..1251: mol_type = other DNA
atgcaccatcatcatcatcatggcggtagcggcatgaaagttctggtgattaattctggtagctcctccatcaaatatcagctcctcgatatgaccaacgaaaaggtattagcgaaaggcttggtcgagcgcattggcatcgacggttcgcgtatcgtgcataaagttaacggcgaaaaacacgtgctggaacatgagattaagaatcacgaaattggacttaaattggtcctggatcttcttacggacgaaaaatacggtgtgttgaaggatctcaaagaaatcgatgcagttgggcatcgcgtagtacatggcggcgagcgttttgccagtagcgtgaagattactgacgaagtcttaaagaccatcgagacgttgtcgttcttagctccgttacacaatccagcgaacattatgggtatcaagagcagcatgaaagagttaccgggtgtgcctcaagttgccgtctttgatacagcgttccaccagaagatgccggagaaagcctatttgtacgcaatcccctatgagtactacgagaaatataaaattcgccgctatgggtttcatggaacctcacatcgttatgtgagtaaacgtgctgcggaaattatgggcaaaccgtacgatcagctcaagatcattaccgttcacgtgggtaacggcgcatcagttgcggcggtgaagaatggcgtatctgttgacacttccatgggtttcacaccacttgaaggtcttgtcatgggcacgcgcagcggcgatattgatccggccatcgtggaatttcttgagaaagaagaaggattgtcggccaaagaagtcgtcaacatcctcaacaagaaatctggtgtgtatgggctcaccaaaggctttagtagtgacatgcgtgacattgaagataatgctattgaaggtgatcctgtatgccgccttgcattcgatgtgtacgaatatcgtatcgcgaaatatattggcgcatacgctgcggccatgaacggtgttgacgcgatcgtctttaccgcaggagttggcgaaaatagcccgattatgcgcgaagaaattattgagaactacttgggctacttagggatcaagatcgataaagaagccaatgacttcaaaggtgaggagaagatcatttcaacgcccgattccaaagtgattgcgatggtagttccgaccaacgaggagctcatgatcgccaaagacacgaaagaaatcattgagaaagggttggacgagcttaagatc

SEQ ID NO: 34 - protein, 417 aa, synthetic construct
  REGION 1..417: note = Variant of acetate kinase
MHHHHHHGGSGMKVLVINSGSSSIKYQLLDMTNEKVLAKGLVERIGIDGSRIVHKVNGEKHVLEHEIKNHEIGLKLVLDLLTDEKYGVLKDLKEIDAVGHRVVHGGERFASSVKITDEVLKTIETLSFLAPLHNPANIMGIKSSMKELPGVPQVAVFDTAFHQKMPEKAYLYAIPYEYYEKYKIRRYGFHGTSHRYVSKRAAEIMGKPYDQLKIITVHVGNGASVAAVKNGVSVDTSMGFTPLEGLVMGTRSGDIDPAIVEFLEKEEGLSAKEVVNILNKKSGVYGLTKGFSSDMRDIEDNAIEGDPVCRLAFDVYEYRIAKYIGAYAAAMNGVDAIVFTAGVGENSPIMREEIIENYLGYLGIKIDKEANDFKGEEKIISTPDSKVIAMVVPTNEELMIAKDTKEIIEKGLDELKI

SEQ ID NO: 35 - DNA, 1251 bp, synthetic construct
  misc_feature 1..1251: note = Variant of acetate kinase
  source 1..1251: mol_type = other DNA
atgcaccatcatcatcatcatggcggtagcggcatgaaagttctggtgattaattctggtagctcctccatcaaatatcagctcctcgatatgaccaacgaaaaggtattagcgaaaggcttggtcgagcgcattggcatcgacggttcgcgtatcgtgcataaagttaacggcgaaaaacacgtgctggaacatgagattaagaatcacgaaattggacttaaattggtcctggatcttcttacggacgaaaaatacggtgtgttgaaggatctcaaagaaatcgatgcagttgggcatcgcgtagtacatggcggcgagcgttttgccagtagcgtgaagattactgacgaagtcttaaagaccatcgagacgttgtcgttcttagctccgttacacaatccagcgaacattatgggtatcaagagcagcatgaaaaagttaccgggtgtgcctcaagttgccgtctttgatacagcgttccaccagaagatgccggagaaagcctatttgtacgcaatcccctatgagtactacgagaaatataaaattcgccgctatgggtttcatggaacctcacatcgttatgtgagtaaacgtgctgcggaaattatgggcaaaccgtacgatcagctcaagatcattaccgttcacgtgggtaacggcgcatcagttgcggcggtgaagaatggcgtatctgttgacacttccatgggtttcacaccacttgaaggtcttgtcatgggcacgcgcagcggcgatattgatccggccatcgtggaatttcttgagaaagaagaaggattgtcggccaaagaagtcgtcaacatcctcaacaagaaatctggtgtgtatgggctcaccaaaggctttagtagtgacatgcgtgacattgaagataatgctattgaaggtgatcctgcatgccgccttgcattcgatgtgtacgaatatcgtatcgcgaaatatattggcgcatacgctgcggccatgaacggtgttgacgcgatcgtctttaccgcaggagttggcgaaaatagcccgattatgcgcgaagaaattattgagaactacttgggctacttagggatcaagatcgataaagaagccaatgacttcaaaggtgaggagaagatcatttcaacgcccgattccaaagtgattgcgatggtagttccgaccaacgaggagctcatgatcgccaaagacacgaaagaaatcattgagaaagggttggacgagcttaagatc

SEQ ID NO: 36 - protein, 417 aa, synthetic construct
  REGION 1..417: note = Variant of acetate kinase
MHHHHHHGGSGMKVLVINSGSSSIKYQLLDMTNEKVLAKGLVERIGIDGSRIVHKVNGEKHVLEHEIKNHEIGLKLVLDLLTDEKYGVLKDLKEIDAVGHRVVHGGERFASSVKITDEVLKTIETLSFLAPLHNPANIMGIKSSMKKLPGVPQVAVFDTAFHQKMPEKAYLYAIPYEYYEKYKIRRYGFHGTSHRYVSKRAAEIMGKPYDQLKIITVHVGNGASVAAVKNGVSVDTSMGFTPLEGLVMGTRSGDIDPAIVEFLEKEEGLSAKEVVNILNKKSGVYGLTKGFSSDMRDIEDNAIEGDPACRLAFDVYEYRIAKYIGAYAAAMNGVDAIVFTAGVGENSPIMREEIIENYLGYLGIKIDKEANDFKGEEKIISTPDSKVIAMVVPTNEELMIAKDTKEIIEKGLDELKI

SEQ ID NO: 37 - DNA, 1251 bp, synthetic construct
  misc_feature 1..1251: note = Variant of acetate kinase
  source 1..1251: mol_type = other DNA
atgcaccatcatcatcatcatggcggtagcggcatgaaagttggggtgattaattctggtagctcctccatcaaatatcagctcctcgatatgaccaacgaaaaggtattagcgaaaggcttggtcgagcgcattggcatcgacggttcgcgtatcgtgcataaagttaacggcgaaaaacacgtgctggaacatgagattaagaatcacgaaattggacttaaattggtcctggatcttcttacggacgaaaaatacggtgtgttgaaggatctcaaagaaatcgatgcagttgggcatcgcgtagtacatggcggcgagcgttttgccagtagcgtgaagattactgacgaagtcttaaagaccatcgagacgttgtcgttcttagctccgttacacaatccagcgaacattatgggtatcaagagcagcatgaaattattaccgggtgtgcctcaagttgccgtctttgatacagcgttccaccagaagatgccggagaaagcctatttgtacgcaatcccctatgagtactacgagaaatataaaattcgccgctatgggtttcatggaacctcacatcgttatgtgagtaaacgtgctgcggaaattatgggcaaaccgtacgatcagctcaagatcattaccgttcacgtgggtaacggcgcatcagttgcggcggtgaagaatggcgtatctgttgacacttccatgggtttcacaccacttgaaggtcttgtcatgggcacgcgcagcggcgatattgatccggccatcgtggaatttcttgagaaagaagaaggattgtcggccaaagaagtcgtcaacatcctcaacaagaaatctggtgtgtatgggctcaccaaaggctttagtagtgacatgcgtgacattgaagataatgctattgaaggtgatcctgtatgccgccttgcattcgatgtgtacgaatatcgtatcgcgaaatatattggcgcatacgctgcggccatgaacggtgttgacgcgatcgtctttaccgcaggagttggcgaaaatagcccgattatgcgcgaagaaattattgagaactacttgggctacttagggatcaagatcgataaagaagccaatgacttcaaaggtgaggagaagatcatttcaacgcccgattccaaagtgattgcgatggtagttccgaccaacgaggagctcatgatcgccaaagacacgaaagaaatcattgagaaagggttggacgagcttaagatc

SEQ ID NO: 38 - protein, 417 aa, synthetic construct
  REGION 1..417: note = Variant of acetate kinase
MHHHHHHGGSGMKVGVINSGSSSIKYQLLDMTNEKVLAKGLVERIGIDGSRIVHKVNGEKHVLEHEIKNHEIGLKLVLDLLTDEKYGVLKDLKEIDAVGHRVVHGGERFASSVKITDEVLKTIETLSFLAPLHNPANIMGIKSSMKLLPGVPQVAVFDTAFHQKMPEKAYLYAIPYEYYEKYKIRRYGFHGTSHRYVSKRAAEIMGKPYDQLKIITVHVGNGASVAAVKNGVSVDTSMGFTPLEGLVMGTRSGDIDPAIVEFLEKEEGLSAKEVVNILNKKSGVYGLTKGFSSDMRDIEDNAIEGDPVCRLAFDVYEYRIAKYIGAYAAAMNGVDAIVFTAGVGENSPIMREEIIENYLGYLGIKIDKEANDFKGEEKIISTPDSKVIAMVVPTNEELMIAKDTKEIIEKGLDELKI

SEQ ID NO: 39 - DNA, 1251 bp, synthetic construct
  misc_feature 1..1251: note = Variant of acetate kinase
  source 1..1251: mol_type = other DNA
atgcaccatcatcatcatcatggcggtagcggcatgaaagttctggtgattaattctggtagctcctccatcaaatatcagctcctcgatatgaccaacgaaaaggtattagcgaaaggcttggtcgagcgcattggcatcgacggttcgcgtatcgtgcataaagttaacggcgaaaaacacgtgctggaacatgagattaagaatcacgaaattggacttcttttggtcctggatcttcttacggacgaaaaatacggtgtgttgaaggatctcaaagaaatcgatgcagttgggcatcgcgtagtacatggcggcgagcgttttgccagtagcgtgaagattactgacgaagtcttaaagaccatcgagacgttgtcgttcttagctccgttacacaatccagcgaacattatgggtatcaagagcagcatgaaattattaccgggtgtgcctcaagttgccgtctttgatacagcgttccaccagaagatgccggagaaagcctatttgtacgcaatcccctatgagtactacgagaaatataaaattcgccgctatgggtttcatggaacctcacatcgttatgtgagtaaacgtgctgcggaaattatgggcaaaccgtacgatcagctcaagatcattaccgttcacgtgggtaacggcgcatcagttgcggcggtgaagaatggcgtatctgttgacacttccatgggtttcacaccacttgaaggtcttgtcatgggcacgcgcagcggcgatattgatccggccatcgtggaatttcttgagaaagaagaaggattgtcggccaaagaagtcgtcaacatcctcaacaagaaatctggtgtgtatgggctcaccaaaggctttagtagtgacatgcgtgacattgaagataatgctattgaaggtgatcctgtatgccgccttgcattcgatgtgtacgaatatcgtatcgcgaaatatattggcgcatacgctgcggccatgaacggtgttgacgcgatcgtctttaccgcaggagttggcgaaaatagcccgattatgcgcgaagaaattattgagaactacttgggctacttagggatcaagatcgataaagaagccaatgacttcaaaggtgaggagaagatcatttcaacgcccgattccaaagtgattgcgatggtagttccgaccaacgaggagctcatgatcgccaaagacacgaaagaaatcattgagaaagggttggacgagcttaagatc

SEQ ID NO: 40 - protein, 417 aa, synthetic construct
  REGION 1..417: note = Variant of acetate kinase
MHHHHHHGGSGMKVLVINSGSSSIKYQLLDMTNEKVLAKGLVERIGIDGSRIVHKVNGEKHVLEHEIKNHEIGLLLVLDLLTDEKYGVLKDLKEIDAVGHRVVHGGERFASSVKITDEVLKTIETLSFLAPLHNPANIMGIKSSMKLLPGVPQVAVFDTAFHQKMPEKAYLYAIPYEYYEKYKIRRYGFHGTSHRYVSKRAAEIMGKPYDQLKIITVHVGNGASVAAVKNGVSVDTSMGFTPLEGLVMGTRSGDIDPAIVEFLEKEEGLSAKEVVNILNKKSGVYGLTKGFSSDMRDIEDNAIEGDPVCRLAFDVYEYRIAKYIGAYAAAMNGVDAIVFTAGVGENSPIMREEIIENYLGYLGIKIDKEANDFKGEEKIISTPDSKVIAMVVPTNEELMIAKDTKEIIEKGLDELKI

SEQ ID NO: 41 - DNA, 1251 bp, synthetic construct
  misc_feature 1..1251: note = Variant of acetate kinase
  source 1..1251: mol_type = other DNA
atgcaccatcatcatcatcatggcggtagcggcatgaaagttctggtgattaattctggtagctcctccatcaaatatcagctcctcgatatgaccaacgaaaaggtattagcgaaaggcttggtcgagcgcattggcatcgacggttcgcgtatcgtgcataaagttaacggcgaaaaacacgtgctggaacatgagattaagaatcacgaaattggacttaaattggtcctggatcttcttacggacgaaaaatacggtgtgttgaaggatctcaaagaaatcgatgcagttgggcatcgcgtagtacatggcggcgagcgttttgccagtagcgtgaagattactgacgaagtcttaaagaccatcgagacgttgtcgttcttagctccgttacacaatccagcgaacattatgggttataagagcagcatgaaattattaccgggtgtgcctcaagttgccgtctttgatacagcgttccaccagaagatgccggagaaagcctatttgtacgcaatcccctatgagtactacgagaaatataaaattcgccgctatgggtttcatggaacctcacatcgttatgtgagtaaacgtgctgcggaaattatgggcaaaccgtacgatcagctcaagatcattaccgttcacgtgggtaacggcgcatcagttgcggcggtgaagaatggcgtatctgttgacacttccatgggtttcacaccacttgaaggtcttgtcatgggcacgcgcagcggcgatattgatccggccatcgtggaatttcttgagaaagaagaaggattgtcggccaaagaagtcgtcaacatcctcaacaagaaatctggtgtgtatgggctcaccaaaggctttagtagtgacatgcgtgacattgaagataatgctattgaaggtgatcctgtatgccgccttgcattcgatgtgtacgaatatcgtatcgcgaaatatattggcgcatacgctgcggccatgaacggtgttgacgcgatcgtctttaccgcaggagttggcgaaaatagcccgattatgcgcgaagaaattattgagaactacttgggctacttagggatcaagatcgataaagaagccaatgacttcaaaggtgaggagaagatcatttcaacgcccgattccaaagtgattgcgatggtagttccgaccaacgaggagctcatgatcgccaaagacacgaaagaaatcattgagaaagggttggacgagcttaagatc

SEQ ID NO: 42 - protein, 417 aa, synthetic construct
  REGION 1..417: note = Variant of acetate kinase
MHHHHHHGGSGMKVLVINSGSSSIKYQLLDMTNEKVLAKGLVERIGIDGSRIVHKVNGEKHVLEHEIKNHEIGLKLVLDLLTDEKYGVLKDLKEIDAVGHRVVHGGERFASSVKITDEVLKTIETLSFLAPLHNPANIMGYKSSMKLLPGVPQVAVFDTAFHQKMPEKAYLYAIPYEYYEKYKIRRYGFHGTSHRYVSKRAAEIMGKPYDQLKIITVHVGNGASVAAVKNGVSVDTSMGFTPLEGLVMGTRSGDIDPAIVEFLEKEEGLSAKEVVNILNKKSGVYGLTKGFSSDMRDIEDNAIEGDPVCRLAFDVYEYRIAKYIGAYAAAMNGVDAIVFTAGVGENSPIMREEIIENYLGYLGIKIDKEANDFKGEEKIISTPDSKVIAMVVPTNEELMIAKDTKEIIEKGLDELKI

SEQ ID NO: 43 - DNA, 1251 bp, synthetic construct
  misc_feature 1..1251: note = Variant of acetate kinase
  source 1..1251: mol_type = other DNA
atgcaccatcatcatcatcatggcggtagcggcatgaaagttctggtgattaattctggtagctcctccatcaaatatcagctcctcgatatgaccaacgaaaaggtattagcgaaaggcttggtcgagcgcattggcatcgacggttcgcgtatcgtgcataaagttaacggcgaaaaacacgtgctggaacatgagattaagaatcacgaaattggacttaaattggtcctggatcttcttacggacgaaaaatacggtgtgttgaaggatctcaaagaaatcgatgcagttgggcatcgcgtagtacatggcggcgagcgttttgccagtagcgtgaagattactgacgaagtcttaaagaccatcgagacgttgtcgttcttagctccgttacacaatccagcgaacattatgggtatcaagagcagcatggagttattaccgggtgtgcctcaagttgccgtctttgatacagcgttccaccagaagatgccggagaaagcctatttgtacgcaatcccctatgagtactacgagaaatataaaattcgccgctatgggtttcatggaacctcacatcgttatgtgagtaaacgtgctgcggaaattatgggcaaaccgtacgatcagctcaagatcattaccgttcacgtgggtaacggcgcatcagttgcggcggtgaagaatggcgtatctgttgacacttccatgggtttcacaccacttgaaggtcttgtcatgggcacgcgcagcggcgatattgatccggccatcgtggaatttcttgagaaagaagaaggattgtcggccaaagaagtcgtcaacatcctcaacaagaaatctggtgtgtatgggctcaccaaaggctttagtagtgacatgcgtgacattgaagataatgctattgaaggtgatcctgtatgccgccttgcattcgatgtgtacgaatatcgtatcgcgaaatatattggcgcatacgctgcggccatgaacggtgttgacgcgatcgtctttaccgcaggagttggcgaaaatagcccgattatgcgcgaagaaattattgagaactacttgggctacttagggatcaagatcgataaagaagccaatgacttcaaaggtgaggagaagatcatttcaacgcccgattccaaagtgattgcgatggtagttccgaccaacgaggagctcatgatcgccaaagacacgaaagaaatcattgagaaagggttggacgagcttaagatc

SEQ ID NO: 44 - protein, 417 aa, synthetic construct
  REGION 1..417: note = Variant of acetate kinase
MHHHHHHGGSGMKVLVINSGSSSIKYQLLDMTNEKVLAKGLVERIGIDGSRIVHKVNGEKHVLEHEIKNHEIGLKLVLDLLTDEKYGVLKDLKEIDAVGHRVVHGGERFASSVKITDEVLKTIETLSFLAPLHNPANIMGIKSSMELLPGVPQVAVFDTAFHQKMPEKAYLYAIPYEYYEKYKIRRYGFHGTSHRYVSKRAAEIMGKPYDQLKIITVHVGNGASVAAVKNGVSVDTSMGFTPLEGLVMGTRSGDIDPAIVEFLEKEEGLSAKEVVNILNKKSGVYGLTKGFSSDMRDIEDNAIEGDPVCRLAFDVYEYRIAKYIGAYAAAMNGVDAIVFTAGVGENSPIMREEIIENYLGYLGIKIDKEANDFKGEEKIISTPDSKVIAMVVPTNEELMIAKDTKEIIEKGLDELKI

SEQ ID NO: 45 - DNA, 1251 bp, synthetic construct
  misc_feature 1..1251: note = Variant of acetate kinase
  source 1..1251: mol_type = other DNA
atgcaccatcatcatcatcatggcggtagcggcatgaaagttctggtgattaattctggtagctcctccatcaaatatcagctcctcgatatgaccaacgaaaaggtattagcgaaaggcttggtcgagcgcattggcatcgacggttcgcgtatcgtgcataaagttaacggcgaaaaacacgtgctggaacatgagattaagaatcacgaaattggacttaaattggtcctggatcttcttacggacgaaaaatacggtgtgttgaaggatctcaaagaaatcgatgcagttgggcatcgcgtagtacatggcggcgagcgttttgccagtagcgtgaagattactgacgaagtcttaaagaccatcgagacgttgtcgttcttagctccgttacacaatccagtgaacattatgggtatcaagagcagcatgaaattattaccgggtgtgcctcaagttgccgtctttgatacagcgttccaccagaagatgccggagaaagcctatttgtacgcaatcccctatgagtactacgagaaatataaaattcgccgctatgggtttcatggaacctcacatcgttatgtgagtaaacgtgctgcggaaattatgggcaaaccgtacgatcagctcaagatcattaccgttcacgtgggtaacggcgcatcagttgcggcggtgaagaatggcgtatctgttgacacttccatgggtttcacaccacttgaaggtcttgtcatgggcacgcgcagcggcgatattgatccggccatcgtggaatttcttgagaaagaagaaggattgtcggccaaagaagtcgtcaacatcctcaacaagaaatctggtgtgtatgggctcaccaaaggctttagtagtgacatgcgtgacattgaagataatgctattgaaggtgatcctgtatgccgccttgcattcgatgtgtacgaatatcgtatcgcgaaatatattggcgcatacgctgcggccatgaacggtgttgacgcgatcgtctttaccgcaggagttggcgaaaatagcccgattatgcgcgaagaaattattgagaactacttgggctacttagggatcaagatcgataaagaagccaatgacttcaaaggtgaggagaagatcatttcaacgcccgattccaaagtgattgcgatggtagttccgaccaacgaggagctcatgatcgccaaagacacgaaagaaatcattgagaaagggttggacgagcttaagatc

SEQ ID NO: 46 - protein, 417 aa, synthetic construct
  REGION 1..417: note = Variant of acetate kinase
MHHHHHHGGSGMKVLVINSGSSSIKYQLLDMTNEKVLAKGLVERIGIDGSRIVHKVNGEKHVLEHEIKNHEIGLKLVLDLLTDEKYGVLKDLKEIDAVGHRVVHGGERFASSVKITDEVLKTIETLSFLAPLHNPVNIMGIKSSMKLLPGVPQVAVFDTAFHQKMPEKAYLYAIPYEYYEKYKIRRYGFHGTSHRYVSKRAAEIMGKPYDQLKIITVHVGNGASVAAVKNGVSVDTSMGFTPLEGLVMGTRSGDIDPAIVEFLEKEEGLSAKEVVNILNKKSGVYGLTKGFSSDMRDIEDNAIEGDPVCRLAFDVYEYRIAKYIGAYAAAMNGVDAIVFTAGVGENSPIMREEIIENYLGYLGIKIDKEANDFKGEEKIISTPDSKVIAMVVPTNEELMIAKDTKEIIEKGLDELKI

SEQ ID NO: 47 - DNA, 1251 bp, synthetic construct
  misc_feature 1..1251: note = Variant of acetate kinase
  source 1..1251: mol_type = other DNA
atgcaccatcatcatcatcatggcggtagcggcatgaaagttctggtgattaattctggtagctcctccatcaaatatcagctcctcgatatgaccaacgaaaaggtattagcgaaaggcttggtcgagcgcattggcatcgacggttcgcgtatcgtgcataaagttaacggcgaaaaacacgtgctggaacatgagattaagaatcacgaaattggacttaaattggtcctggatcttcttacggacgaaaaatacggtgtgttgaaggatctcaaagaaatcgatgcagttgggcatcgcgtagtacatggcggcgagcgttttgccagtagcgtgaagattactgacgaagtctcaaagaccatcgagacgttgtcgttcttagctccgttacacaatctggcgaacattatgggtatcaagagcagcatgaaattattaccgggtgtgcctcaagttgccgtctttgatacagcgttccaccagaagatgccggagaaagcctatttgtacgcaatcccctatgagtactacgagaaatataaaattcgccgctatgggtttcatggaacctcacatcgttatgtgagtaaacgtgctgcggaaattatgggcaaaccgtacgatcagctcaagatcattaccgttcacgtgggtaacggcgcatcagttgcggcggtgaagaatggcgtatctgttgacacttccatgggtttcacaccacttgaaggtcttgtcatgggcacgcgcagcggcgatattgatccggccatcgtggaatttcttgagaaagaagaaggattgtcggccaaagaagtcgtcaacatcctcaacaagaaatctggtgtgtatgggctcaccaaaggctttagtagtgacatgcgtgacattgaagataatgctattgaaggtgatcctgtatgccgccttgcattcgatgtgtacgaatatcgtatcgcgaaatatattggcgcatacgctgcggccatgaacggtgttgacgcgatcgtctttaccgcaggagttggcgaaaatagcccgattatgcgcgaagaaattattgagaactacttgggctacttagggatcaagatcgataaagaagccaatgacttcaaaggtgaggagaagatcatttcaacgcccgattccaaagtgattgcgatggtagttccgaccaacgaggagctcatgatcgccaaagacacgaaagaaatcattgagaaagggttggacgagcttaagatc

SEQ ID NO: 48 - protein, 417 aa, synthetic construct
  REGION 1..417: note = Variant of acetate kinase
MHHHHHHGGSGMKVLVINSGSSSIKYQLLDMTNEKVLAKGLVERIGIDGSRIVHKVNGEKHVLEHEIKNHEIGLKLVLDLLTDEKYGVLKDLKEIDAVGHRVVHGGERFASSVKITDEVSKTIETLSFLAPLHNLANIMGIKSSMKLLPGVPQVAVFDTAFHQKMPEKAYLYAIPYEYYEKYKIRRYGFHGTSHRYVSKRAAEIMGKPYDQLKIITVHVGNGASVAAVKNGVSVDTSMGFTPLEGLVMGTRSGDIDPAIVEFLEKEEGLSAKEVVNILNKKSGVYGLTKGFSSDMRDIEDNAIEGDPVCRLAFDVYEYRIAKYIGAYAAAMNGVDAIVFTAGVGENSPIMREEIIENYLGYLGIKIDKEANDFKGEEKIISTPDSKVIAMVVPTNEELMIAKDTKEIIEKGLDELKI

SEQ ID NO: 49 - DNA, 1251 bp, synthetic construct
  misc_feature 1..1251: note = Variant of acetate kinase
  source 1..1251: mol_type = other DNA
atgcaccatcatcatcatcatggcggtagcggcatgaaagttctggtgattaattctggtagctcctccatcaaatatcagctcctcgatatgaccaacgaaaaggtattagcgaaaggcttggtcgagcgcattggcatcgacggttcgcgtatcgtgcataaagttaacggcgaaaaacacgtgctggaacatgagattaagaatcacgaaattggacttaaattggtcctggatcttcttacggacgaaaaatacggtgtgttgaaggatctcaaagaaatcgatgcagttgggcatcgcgtagtacatggcggcgagcgttttgccagtagcgtgaagattactgacgaagtcttaaagaccatcgagacgttgtcgttcttagctccgttacacaatccagcgaacattatgggtatcaagagcagcatgaaattattaccgggtgtgcctcaagttgccgtctttgatacatgtttccaccagaagatgccggagaaagcctatttgtacgcaatcccctatgagtactacgagaaatataaaattcgccgctatgggtttcatggaacctcacatcgttatgtgagtaaacgtgctgcggaaattatgggcaaaccgtacgatcagctcaagatcattaccgttcacgtgggtaacggcgcatcagttgcggcggtgaagaatggcgtatctgttgacacttccatgggtttcacaccacttgaaggtcttgtcatgggcacgcgcagcggcgatattgatccggccatcgtggaatttcttgagaaagaagaaggattgtcggccaaagaagtcgtcaacatcctcaacaagaaatctggtgtgtatgggctcaccaaaggctttagtagtgacatgcgtgacattgaagataatgctattgaaggtgatcctgtatgccgccttgcattcgatgtgtacgaatatcgtatcgcgaaatatattggcgcatacgctgcggccatgaacggtgttgacgcgatcgtctttaccgcaggagttggcgaaaatagcccgattatgcgcgaagaaattattgagaactacttgggctacttagggatcaagatcgataaagaagccaatgacttcaaaggtgaggagaagatcatttcaacgcccgattccaaagtgattgcgatggtagttccgaccaacgaggagctcatgatcgccaaagacacgaaagaaatcattgagaaagggttggacgagcttaagatc

SEQ ID NO: 50 - protein, 417 aa, synthetic construct
  REGION 1..417: note = Variant of acetate kinase
MHHHHHHGGSGMKVLVINSGSSSIKYQLLDMTNEKVLAKGLVERIGIDGSRIVHKVNGEKHVLEHEIKNHEIGLKLVLDLLTDEKYGVLKDLKEIDAVGHRVVHGGERFASSVKITDEVLKTIETLSFLAPLHNPANIMGIKSSMKLLPGVPQVAVFDTCFHQKMPEKAYLYAIPYEYYEKYKIRRYGFHGTSHRYVSKRAAEIMGKPYDQLKIITVHVGNGASVAAVKNGVSVDTSMGFTPLEGLVMGTRSGDIDPAIVEFLEKEEGLSAKEVVNILNKKSGVYGLTKGFSSDMRDIEDNAIEGDPVCRLAFDVYEYRIAKYIGAYAAAMNGVDAIVFTAGVGENSPIMREEIIENYLGYLGIKIDKEANDFKGEEKIISTPDSKVIAMVVPTNEELMIAKDTKEIIEKGLDELKI

SEQ ID NO: 51 - DNA, 1251 bp, synthetic construct
  misc_feature 1..1251: note = Variant of acetate kinase
  source 1..1251: mol_type = other DNA
atgcaccatcatcatcatcatggcggtagcggcatgaaagttctggtgattaattctggtagctcctccatcaaatatcagctcctcgatatgaccaacgaaaaggtattagcgaaaggcttggtcgagcgcattggcatcgacggttcgcgtatcgtgcataaagttaacggcgaaaaacacgtgctggaacatgagattaagaatcacgaaattggacttaaattggtcctggatcttcttacggacgaaaaatacggtgtgttgaaggatctcaaagaaatcgatgcagttgggcatcgcgtagtacatggcggcgagcgttttgccagtagcgtgaagattactgacgaagtcttaaagaccatcgagacgttgtcgttcttagctccgttacacaatccagcgaacattatgggtatcaagagcagcatgaaattattaccgggtgtgcctcaagttgccgtctttgatacagcgttccaccagaagatgccggagaaagcctatttgtacgcaatcccctatgagtactacgagaaatataaaattcgccgctatgggtttcatggaacctcacatcgttatgtgagtaaacgtgctgcggaaattatgggcaaaccgtacgatcagctcaagatcattacctgccacgtgggtaacggcgcatcagttgcggcggtgaagaatggcgtatctgttgacacttccatgggtttcacaccacttgaaggtcttgtcatgggcacgcgcagcggcgatattgatccggccatcgtggaatttcttgagaaagaagaaggattgtcggccaaagaagtcgtcaacatcctcaacaagaaatctggtgtgtatgggctcaccaaaggctttagtagtgacatgcgtgacattgaagataatgctattgaaggtgatcctgtatgccgccttgcattcgatgtgtacgaatatcgtatcgcgaaatatattggcgcatacgctgcggccatgaacggtgttgacgcgatcgtctttaccgcaggagttggcgaaaatagcccgattatgcgcgaagaaattattgagaactacttgggctacttagggatcaagatcgataaagaagccaatgacttcaaaggtgaggagaagatcatttcaacgcccgattccaaagtgattgcgatggtagttccgaccaacgaggagctcatgatcgccaaagacacgaaagaaatcattgagaaagggttggacgagcttaagatc

SEQ ID NO: 52 - protein, 417 aa, synthetic construct
  REGION 1..417: note = Variant of acetate kinase
MHHHHHHGGSGMKVLVINSGSSSIKYQLLDMTNEKVLAKGLVERIGIDGSRIVHKVNGEKHVLEHEIKNHEIGLKLVLDLLTDEKYGVLKDLKEIDAVGHRVVHGGERFASSVKITDEVLKTIETLSFLAPLHNPANIMGIKSSMKLLPGVPQVAVFDTAFHQKMPEKAYLYAIPYEYYEKYKIRRYGFHGTSHRYVSKRAAEIMGKPYDQLKIITCHVGNGASVAAVKNGVSVDTSMGFTPLEGLVMGTRSGDIDPAIVEFLEKEEGLSAKEVVNILNKKSGVYGLTKGFSSDMRDIEDNAIEGDPVCRLAFDVYEYRIAKYIGAYAAAMNGVDAIVFTAGVGENSPIMREEIIENYLGYLGIKIDKEANDFKGEEKIISTPDSKVIAMVVPTNEELMIAKDTKEIIEKGLDELKI

SEQ ID NO: 53 - DNA, 1251 bp, synthetic construct
  misc_feature 1..1251: note = Variant of acetate kinase
  source 1..1251: mol_type = other DNA
atgcaccatcatcatcatcatggcggtagcggcatgaaagttctggtgattaattctggtagctcctccatcaaatatcagctcctcgatatgaccaacgaaaaggtattagcgaaaggcttggtcgagcgcattggcatcgacggttcgcgtatcgtgcataaagttaacggcgaaaaacacgtgctggaacatgagattaagaatcacgaaattggacttaaattggtcctggatcttcttacggacgaaaaatacggtgtgttgaaggatctcaaagaaatcgatgcagttgggcatcgcgtagtacatggcggcgagcgttttgccagtagcgtgaagattactgacgaagtcttaaagaccatcgagacgttgtcgttcttagctccgttacacaatgctgcgaacattatgggtatcaagagcagcatgaaattattaccgggtgtgcctcaagttgccgtctttgatacagcgttccaccagaagatgccggagaaagcctatttgtacgcaatcccctatgagtactacgagaaatataaaattcgccgctatgggtttcatggaacctcacatcgttatgtgagtaaacgtgctgcggaaattatgggcaaaccgtacgatcagctcaagatcattaccgttcacgtgggtaacggcgcatcagttgcggcggtgaagaatggcgtatctgttgacacttccatgggtttcacaccacttgaaggtcttgtcatgggcacgcgcagcggcgatattgatccggccatcgtggaatttcttgagaaagaagaaggattgtcggccaaagaagtcgtcaacatcctcaacaagaaatctggtgtgtatgggctcaccaaaggctttagtagtgacatgcgtgacattgaagataatgctattgaaggtgatcctgtatgccgccttgcattcgatgtgtacgaatatcgtatcgcgaaatatattggcgcatacgctgcggccatgaacggtgttgacgcgatcgtctttaccgcaggagttggcgaaaatagcccgattatgcgcgaagaaattattgagaactacttgggctacttagggatcaagatcgataaagaagccaatgacttcaaaggtgaggagaagatcatttcaacgcccgattccaaagtgattgcgatggtagttccgaccaacgaggagctcatgatcgccaaagacacgaaagaaatcattgagaaagggttggacgagcttaagatc

SEQ ID NO: 54 - protein, 417 aa, synthetic construct
  REGION 1..417: note = Variant of acetate kinase
MHHHHHHGGSGMKVLVINSGSSSIKYQLLDMTNEKVLAKGLVERIGIDGSRIVHKVNGEKHVLEHEIKNHEIGLKLVLDLLTDEKYGVLKDLKEIDAVGHRVVHGGERFASSVKITDEVLKTIETLSFLAPLHNAANIMGIKSSMKLLPGVPQVAVFDTAFHQKMPEKAYLYAIPYEYYEKYKIRRYGFHGTSHRYVSKRAAEIMGKPYDQLKIITVHVGNGASVAAVKNGVSVDTSMGFTPLEGLVMGTRSGDIDPAIVEFLEKEEGLSAKEVVNILNKKSGVYGLTKGFSSDMRDIEDNAIEGDPVCRLAFDVYEYRIAKYIGAYAAAMNGVDAIVFTAGVGENSPIMREEIIENYLGYLGIKIDKEANDFKGEEKIISTPDSKVIAMVVPTNEELMIAKDTKEIIEKGLDELKI

SEQ ID NO: 55 - DNA, 1251 bp, synthetic construct
  misc_feature 1..1251: note = Variant of acetate kinase
  source 1..1251: mol_type = other DNA
atgcaccatcatcatcatcatggcggtagcggcatgaaagttctggtgattaattctggtagctcctccatcaaatatcagctcctcgatatgaccaacgaaaaggtattagcgaaaggcttggtcgagcgcattggcatcgacggttcgcgtatcgtgcataaagttaacggcgaaaaacacgtgctggaacatgagattaagaatcacgaaattggacttaaattggtcctggatcttcttacggacgaaaaatacggtgtgttgaaggatctcaaagaaatcgatgcagttgggcatcgcgtagtacatggcggcgagcgttttgccagtagcgtgaagattactgacgaagtcttaaagaccatcgagacgttgtcgttcttagctccgttacacaatccagcgaacattatgggtatcaagagcagcatgaaattaatgccgggtgtgcctcaagttgccgtctttgatacagcgttccaccagaagatgccggagaaagcctatttgtacgcaatcccctatgagtactacgagaaatataaaattcgccgctatgggtttcatggaacctcacatcgttatgtgagtaaacgtgctgcggaaattatgggcaaaccgtacgatcagctcaagatcattaccgttcacgtgggtaacggcgcatcagttgcggcggtgaagaatggcgtatctgttgacacttccatgggtttcacaccacttgaaggtcttgtcatgggcacgcgcagcggcgatattgatccggccatcgtggaatttcttgagaaagaagaaggattgtcggccaaagaagtcgtcaacatcctcaacaagaaatctggtgtgtatgggctcaccaaaggctttagtagtgacatgcgtgacattgaagataatgctattgaaggtgatcctgtatgccgccttgcattcgatgtgtacgaatatcgtatcgcgaaatatattggcgcatacgctgcggccatgaacggtgttgacgcgatcgtctttaccgcaggagttggcgaaaatagcccgattatgcgcgaagaaattattgagaactacttgggctacttagggatcaagatcgataaagaagccaatgacttcaaaggtgaggagaagatcatttcaacgcccgattccaaagtgattgcgatggtagttccgaccaacgaggagctcatgatcgccaaagacacgaaagaaatcattgagaaagggttggacgagcttaagatc

SEQ ID NO: 56 - protein, 417 aa, synthetic construct
  REGION 1..417: note = Variant of acetate kinase
MHHHHHHGGSGMKVLVINSGSSSIKYQLLDMTNEKVLAKGLVERIGIDGSRIVHKVNGEKHVLEHEIKNHEIGLKLVLDLLTDEKYGVLKDLKEIDAVGHRVVHGGERFASSVKITDEVLKTIETLSFLAPLHNPANIMGIKSSMKLMPGVPQVAVFDTAFHQKMPEKAYLYAIPYEYYEKYKIRRYGFHGTSHRYVSKRAAEIMGKPYDQLKIITVHVGNGASVAAVKNGVSVDTSMGFTPLEGLVMGTRSGDIDPAIVEFLEKEEGLSAKEVVNILNKKSGVYGLTKGFSSDMRDIEDNAIEGDPVCRLAFDVYEYRIAKYIGAYAAAMNGVDAIVFTAGVGENSPIMREEIIENYLGYLGIKIDKEANDFKGEEKIISTPDSKVIAMVVPTNEELMIAKDTKEIIEKGLDELKI

SEQ ID NO: 57 - DNA, 1251 bp, synthetic construct
  misc_feature 1..1251: note = Variant of acetate kinase
  source 1..1251: mol_type = other DNA
atgcaccatcatcatcatcatggcggtagcggcatgaaagttctggtgattaattctggtagctcctccatcaaatatcagctcctcgatatgaccaacgaaaaggtattagcgaaaggcttggtcgagcgcattggcatcgacggttcgcgtatcgtgcataaagttaacggcgaaaaacacgtgctggaacatgagattaagaatcacgaaattggacttaaattggtcctggatcttcttacggacgaaaaatacggtgtgttgaaggatctcaaagaaatcgatgcagttgggcatcgcgtagtacatggcggcgagcgttttgccagtagcgtgaagattactgacgaagtcttaaagaccatcgagacgttgtcgttcttagctccgttacacaatccagcgaacattatgggtatcaagagcagcatgaaattattaccgggtgtgcctcaagttgccgtctttgatacagcgttccaccagaagatgccggagaaagcctatttgtacgcaatcccctatgagtactacgagaaatataaaattcgccgctatgggtttcatggaacctcacatcgttatgtgagtaaacgtgctgcggaaattatgggcaaaccgtacgatcagctcaagatcattaccgttcacgtgggtaacggcgcatcagttgcggcggtgaagaatggcgtatctgttgacacttccatgggtttcacaccacttgaaggtcttgtcatgggcacgcgcagcggcgatattgatccggccatcgtggaatttcttgagaaagaagaaggattgtcggccaaagaagtcgtcaacatcctcaacaagaaatctggtgtgtatgggctcaccaaaggctttagtagtgacatgcgtgacattgaagatgcggctattgaaggtgatcctgtatgccgccttgcattcgatgtgtacgaatatcgtatcgcgaaatatattggcgcatacgctgcggccatgaacggtgttgacgcgatcgtctttaccgcaggagttggcgaaaatagcccgattatgcgcgaagaaattattgagaactacttgggctacttagggatcaagatcgataaagaagccaatgacttcaaaggtgaggagaagatcatttcaacgcccgattccaaagtgattgcgatggtagttccgaccaacgaggagctcatgatcgccaaagacacgaaagaaatcattgagaaagggttggacgagcttaagatc

SEQ ID NO: 58 - protein, 417 aa, synthetic construct
  REGION 1..417: note = Variant of acetate kinase
MHHHHHHGGSGMKVLVINSGSSSIKYQLLDMTNEKVLAKGLVERIGIDGSRIVHKVNGEKHVLEHEIKNHEIGLKLVLDLLTDEKYGVLKDLKEIDAVGHRVVHGGERFASSVKITDEVLKTIETLSFLAPLHNPANIMGIKSSMKLLPGVPQVAVFDTAFHQKMPEKAYLYAIPYEYYEKYKIRRYGFHGTSHRYVSKRAAEIMGKPYDQLKIITVHVGNGASVAAVKNGVSVDTSMGFTPLEGLVMGTRSGDIDPAIVEFLEKEEGLSAKEVVNILNKKSGVYGLTKGFSSDMRDIEDAAIEGDPVCRLAFDVYEYRIAKYIGAYAAAMNGVDAIVFTAGVGENSPIMREEIIENYLGYLGIKIDKEANDFKGEEKIISTPDSKVIAMVVPTNEELMIAKDTKEIIEKGLDELKI

SEQ ID NO: 59 - DNA, 1251 bp, synthetic construct
  misc_feature 1..1251: note = Variant of acetate kinase
  source 1..1251: mol_type = other DNA
atgcaccatcatcatcatcatggcggtagcggcatgaaagttctggtgattaattctggtagctcctccatcaaatatcagctcctcgatatgaccaacgaaaaggtattagcgaaaggcttggtcgagcgcattggcatcgacggttcgcgtatcgtgcataaagttaacggcgaaaaacacgtgctggaacatgagattaagaatcacgaaattggacttaaattggtcctggatcttcttacggacgaaaaatacggtgtgttgaaggatctcaaagaaatcgatgcagttgggcatcgcgtagtacatggcggcgagcgttttgccagtagcgtgaagattactgacgaagtcttaaagaccatcgagacgttgtcgttcttaattccgttacacaatccagcgaacattatgggtatcaagagcagcatgaaattattaccgggtgtgcctcaagttgccgtctttgatacagcgttccaccagaagatgccggagaaagcctatttgtacgcaatcccctatgagtactacgagaaatataaaattcgccgctatgggtttcatggaacctcacatcgttatgtgagtaaacgtgctgcggaaattatgggcaaaccgtacgatcagctcaagatcattaccgttcacgtgggtaacggcgcatcagttgcggcggtgaagaatggcgtatctgttgacacttccatgggtttcacaccacttgaaggtcttgtcatgggcacgcgcagcggcgatattgatccggccatcgtggaatttcttgagaaagaagaaggattgtcggccaaagaagtcgtcaacatcctcaacaagaaatctggtgtgtatgggctcaccaaaggctttagtagtgacatgcgtgacattgaagataatgctattgaaggtgatcctgtatgccgccttgcattcgatgtgtacgaatatcgtatcgcgaaatatattggcgcatacgctgcggccatgaacggtgttgacgcgatcgtctttaccgcaggagttggcgaaaatagcccgattatgcgcgaagaaattattgagaactacttgggctacttagggatcaagatcgataaagaagccaatgacttcaaaggtgaggagaagatcatttcaacgcccgattccaaagtgattgcgatggtagttccgaccaacgaggagctcatgatcgccaaagacacgaaagaaatcattgagaaagggttggacgagcttaagatc

SEQ ID NO: 60 - protein, 417 aa, synthetic construct
  REGION 1..417: note = Variant of acetate kinase
MHHHHHHGGSGMKVLVINSGSSSIKYQLLDMTNEKVLAKGLVERIGIDGSRIVHKVNGEKHVLEHEIKNHEIGLKLVLDLLTDEKYGVLKDLKEIDAVGHRVVHGGERFASSVKITDEVLKTIETLSFLIPLHNPANIMGIKSSMKLLPGVPQVAVFDTAFHQKMPEKAYLYAIPYEYYEKYKIRRYGFHGTSHRYVSKRAAEIMGKPYDQLKIITVHVGNGASVAAVKNGVSVDTSMGFTPLEGLVMGTRSGDIDPAIVEFLEKEEGLSAKEVVNILNKKSGVYGLTKGFSSDMRDIEDNAIEGDPVCRLAFDVYEYRIAKYIGAYAAAMNGVDAIVFTAGVGENSPIMREEIIENYLGYLGIKIDKEANDFKGEEKIISTPDSKVIAMVVPTNEELMIAKDTKEIIEKGLDELKI

SEQ ID NO: 61 - DNA, 1251 bp, synthetic construct
  misc_feature 1..1251: note = Variant of acetate kinase
  source 1..1251: mol_type = other DNA
atgcaccatcatcatcatcatggcggtagcggcatgaaagttactgtgattaattctggtagctcctccatcaaatatcagctcctcgatatgaccaacgaaaaggtattagcgaaaggcttggtcgagcgcattggcatcgacggttcgcgtatcgtgcataaagttaacggcgaaaaacacgtgctggaacatgagattaagaatcacgaaattggacttaaattggtcctggatcttcttacggacgaaaaatacggtgtgttgaaggatctcaaagaaatcgatgcagttgggcatcgcgtagtacatggcggcgagcgttttgccagtagcgtgaagattactgacgaagtcttaaagaccatcgagacgttgtcgttcttagctccgttacacaatccagcgaacattatgggtatcaagagcagcatgaaattattaccgggtgtgcctcaagttgccgtctttgatacagcgttccaccagaagatgccggagaaagcctatttgtacgcaatcccctatgagtactacgagaaatataaaattcgccgctatgggtttcatggaacctcacatcgttatgtgagtaaacgtgctgcggaaattatgggcaaaccgtacgatcagctcaagatcattaccgttcacgtgggtaacggcgcatcagttgcggcggtgaagaatggcgtatctgttgacacttccatgggtttcacaccacttgaaggtcttgtcatgggcacgcgcagcggcgatattgatccggccatcgtggaatttcttgagaaagaagaaggattgtcggccaaagaagtcgtcaacatcctcaacaagaaatctggtgtgtatgggctcaccaaaggctttagtagtgacatgcgtgacattgaagataatgctattgaaggtgatcctgtatgccgccttgcattcgatgtgtacgaatatcgtatcgcgaaatatattggcgcatacgctgcggccatgaacggtgttgacgcgatcgtctttaccgcaggagttggcgaaaatagcccgattatgcgcgaagaaattattgagaactacttgggctacttagggatcaagatcgataaagaagccaatgacttcaaaggtgaggagaagatcatttcaacgcccgattccaaagtgattgcgatggtagttccgaccaacgaggagctcatgatcgccaaagacacgaaagaaatcattgagaaagggttggacgagcttaagatc

SEQ ID NO: 62 - protein, 417 aa, synthetic construct
  REGION 1..417: note = Variant of acetate kinase
MHHHHHHGGSGMKVTVINSGSSSIKYQLLDMTNEKVLAKGLVERIGIDGSRIVHKVNGEKHVLEHEIKNHEIGLKLVLDLLTDEKYGVLKDLKEIDAVGHRVVHGGERFASSVKITDEVLKTIETLSFLAPLHNPANIMGIKSSMKLLPGVPQVAVFDTAFHQKMPEKAYLYAIPYEYYEKYKIRRYGFHGTSHRYVSKRAAEIMGKPYDQLKIITVHVGNGASVAAVKNGVSVDTSMGFTPLEGLVMGTRSGDIDPAIVEFLEKEEGLSAKEVVNILNKKSGVYGLTKGFSSDMRDIEDNAIEGDPVCRLAFDVYEYRIAKYIGAYAAAMNGVDAIVFTAGVGENSPIMREEIIENYLGYLGIKIDKEANDFKGEEKIISTPDSKVIAMVVPTNEELMIAKDTKEIIEKGLDELKI

SEQ ID NO: 63 - DNA, 1251 bp, synthetic construct
  misc_feature 1..1251: note = Variant of acetate kinase
  source 1..1251: mol_type = other DNA
atgcaccatcatcatcatcatggcggtagcgacatgaaagttctggtgattaattctggtagctcctccatcaaatatcagctcctcgatatgaccaacgaaaaggtattagcgaaaggcttggtcgagcgcattggcatcgacggtactcgtatcgtgcataaagttaacggcgaaaaacacgtgctggaacatgagattaagaatcacgaaattggacttaaattggtcctggatcttcttacggacgaaaaatacggtgtgttgaaggatctcaaagaaatcgatgcagttgggcatcgcgtagtacatggcggcgagcgttttgccagtagcgtgaagattactgacgaagtcttaaagaccatcgagacgttgtcgttcttagctccgttacacaatccagcgaacattatgggtatcaagagcagcatgaaattattaccgggtgtgcctcaagttgccgtctttgatacagcgttccaccagaagatgccggagaaagcctatttgtacgcaatcccctatgagtactacgagaaatataaaattcgccgctatgggtttcatggaacctcacatcgttatgtgagtaaacgtgctgcggaaattatgggcaaaccgtacgatcagctcaagatcattaccgttcacgtgggtaacggcgcatcagttgcggcggtgaagaatggcgtatctgttgacacttccatgggtttcacaccacttgaaggtcttgtcatgggcacgcgcagcggcgatattgatccggccatcgtggaatttcttgagaaagaagaaggattgtcggccaaagaagtcgtcaacatcctcaacaagaaatctggtgtgtatgggctcaccaaaggctttagtagtgacatgcgtgacattgaagataatgctattgaaggtgatcctgtatgccgccttgcattcgatgtgtacgaatatcgtatcgcgaaatatattggcgcatacgctgcggccatgaacggtgttgacgcgatcgtctttaccgcaggagttggcgaaaatagcccgattatgcgcgaagaaattattgagaactacttgggctacttagggatcaagatcgataaagaagccaatgacttcaaaggtgaggagaagatcatttcaacgcccgattccaaagtgattgcgatggtagttccgaccaacgaggagctcatgatcgccaaagacacgaaagaaatcattgagaaagggttggacgagcttaagatc

SEQ ID NO: 64 - protein, 417 aa, synthetic construct
  REGION 1..417: note = Variant of acetate kinase
MHHHHHHGGSDMKVLVINSGSSSIKYQLLDMTNEKVLAKGLVERIGIDGTRIVHKVNGEKHVLEHEIKNHEIGLKLVLDLLTDEKYGVLKDLKEIDAVGHRVVHGGERFASSVKITDEVLKTIETLSFLAPLHNPANIMGIKSSMKLLPGVPQVAVFDTAFHQKMPEKAYLYAIPYEYYEKYKIRRYGFHGTSHRYVSKRAAEIMGKPYDQLKIITVHVGNGASVAAVKNGVSVDTSMGFTPLEGLVMGTRSGDIDPAIVEFLEKEEGLSAKEVVNILNKKSGVYGLTKGFSSDMRDIEDNAIEGDPVCRLAFDVYEYRIAKYIGAYAAAMNGVDAIVFTAGVGENSPIMREEIIENYLGYLGIKIDKEANDFKGEEKIISTPDSKVIAMVVPTNEELMIAKDTKEIIEKGLDELKI

SEQ ID NO: 65 - DNA, 1251 bp, synthetic construct
  misc_feature 1..1251: note = Variant of acetate kinase
  source 1..1251: mol_type = other DNA
atgcaccatcatcatcatcatggcggtagcggcatgaaagttctggtgattaattctggtagctcctccatcaaatatcagctcctcgatatgaccaacgaaaaggtattagcgaaaggcttggtcgagcgcattggcatcgacggttcgcgtatcgtgcataaagttaacggcgaaaaacacgtgctggaacatgagattaagaatcacgaaattggacttaaattggtcctggatcttcttacggacgaaaaatacggtgtgttgaaggatctcaaagaaatcgatgcagttgggcatcgcgtagtacatggcggcgagcgttttgccagtagcgtgaagattactgacgaagtcttaaagaccatcgagacgttgtcgttcttagctccgttacacaatccagcgaacattatgggtatcaagagcagcatgaaattattaccgggtgtgcctcaagttgcccggtttgatacagcgttccaccagaagatgccggagaaagcctatttgtacgcaatcccctatgagtactacgagaaatataaaattcgccgctatgggtttcatggaacctcacatcgttatgtgagtaaacgtgctgcggaaattatgggcaaaccgtacgatcagctcaagatcattaccgttcacgtgggtaacggcgcatcagttgcggcggtgaagaatggcgtatctgttgacacttccatgggtttcacaccacttgaaggtcttgtcatgggcacgcgcagcggcgatattgatccggccatcgtggaatttcttgagaaagaagaaggattgtcggccaaagaagtcgtcaacatcctcaacaagaaatctggtgtgtatgggctcaccaaaggctttagtagtgacatgcgtgacattgaagataatgctattgaaggtgatcctgtatgccgccttgcattcgatgtgtacgaatatcgtatcgcgaaatatattggcgcatacgctgcggccatgaacggtgttgacgcgatcgtctttaccgcaggagttggcgaaaatagcccgattatgcgcgaagaaattattgagaactacttgggctacttagggatcaagatcgataaagaagccaatgacttcaaaggtgaggagaagatcatttcaacgcccgattccaaagtgattgcgatggtagttccgaccaacgaggagctcatgatcgccaaagacacgaaagaaatcattgagaaagggttggacgagcttaagatc

SEQ ID NO: 66 - protein, 417 aa, synthetic construct
  REGION 1..417: note = Variant of acetate kinase
MHHHHHHGGSGMKVLVINSGSSSIKYQLLDMTNEKVLAKGLVERIGIDGSRIVHKVNGEKHVLEHEIKNHEIGLKLVLDLLTDEKYGVLKDLKEIDAVGHRVVHGGERFASSVKITDEVLKTIETLSFLAPLHNPANIMGIKSSMKLLPGVPQVARFDTAFHQKMPEKAYLYAIPYEYYEKYKIRRYGFHGTSHRYVSKRAAEIMGKPYDQLKIITVHVGNGASVAAVKNGVSVDTSMGFTPLEGLVMGTRSGDIDPAIVEFLEKEEGLSAKEVVNILNKKSGVYGLTKGFSSDMRDIEDNAIEGDPVCRLAFDVYEYRIAKYIGAYAAAMNGVDAIVFTAGVGENSPIMREEIIENYLGYLGIKIDKEANDFKGEEKIISTPDSKVIAMVVPTNEELMIAKDTKEIIEKGLDELKI

SEQ ID NO: 67 - DNA, 1251 bp, synthetic construct
  misc_feature 1..1251: note = Variant of acetate kinase
  source 1..1251: mol_type = other DNA
atgcaccatcatcatcatcatggcggtagcggcatgaaagttctgaatattaattctggtagctcctccatcaaatatcagctcctcgatatgaccaacgaaaaggtattagcgaaaggcttggtcgagcgcattggcatcgacggttcgcgtatcgtgcataaagttaacggcgaaaaacacgtgctggaacatgagattaagaatcacgaaattggacttaaattggtcctggatcttcttacggacgaaaaatacggtgtgttgaaggatctcaaagaaatcgatgcagttgggcatcgcgtagtacatggcggcgagcgttttgccagtagcgtgaagattactgacgaagtcttaaagaccatcgagacgttgtcgttcttagctccgttacacaatccagcgaacattatgggtatcaagagcagcatgaaattattaccgggtgtgcctcaagttgccgtctttgatacagcgttccaccagaagatgccggagaaagcctatttgtacgcaatcccctatgagtactacgagaaatataaaattcgccgctatgggtttcatggaacctcacatcgttatgtgagtaaacgtgctgcggaaattatgggcaaaccgtacgatcagctcaagatcattaccgttcacgtgggtaacggcgcatcagttgcggcggtgaagaatggcgtatctgttgacacttccatgggtttcacaccacttgaaggtcttgtcatgggcacgcgcagcggcgatattgatccggccatcgtggaatttcttgagaaagaagaaggattgtcggccaaagaagtcgtcaacatcctcaacaagaaatctggtgtgtatgggctcaccaaaggctttagtagtgacatgcgtgacattgaagataatgctattgaaggtgatcctgtatgccgccttgcattcgatgtgtacgaatatcgtatcgcgaaatatattggcgcatacgctgcggccatgaacggtgttgacgcgatcgtctttaccgcaggagttggcgaaaatagcccgattatgcgcgaagaaattattgagaactacttgggctacttagggatcaagatcgataaagaagccaatgacttcaaaggtgaggagaagatcatttcaacgcccgattccaaagtgattgcgatggtagttccgaccaacgaggagctcatgatcgccaaagacacgaaagaaatcattgagaaagggttggacgagcttaagatc

SEQ ID NO: 68 - protein, 417 aa, synthetic construct
  REGION 1..417: note = Variant of acetate kinase
MHHHHHHGGSGMKVLNINSGSSSIKYQLLDMTNEKVLAKGLVERIGIDGSRIVHKVNGEKHVLEHEIKNHEIGLKLVLDLLTDEKYGVLKDLKEIDAVGHRVVHGGERFASSVKITDEVLKTIETLSFLAPLHNPANIMGIKSSMKLLPGVPQVAVFDTAFHQKMPEKAYLYAIPYEYYEKYKIRRYGFHGTSHRYVSKRAAEIMGKPYDQLKIITVHVGNGASVAAVKNGVSVDTSMGFTPLEGLVMGTRSGDIDPAIVEFLEKEEGLSAKEVVNILNKKSGVYGLTKGFSSDMRDIEDNAIEGDPVCRLAFDVYEYRIAKYIGAYAAAMNGVDAIVFTAGVGENSPIMREEIIENYLGYLGIKIDKEANDFKGEEKIISTPDSKVIAMVVPTNEELMIAKDTKEIIEKGLDELKI

SEQ ID NO: 69 - DNA, 1251 bp, synthetic construct
  misc_feature 1..1251: note = Variant of acetate kinase
  source 1..1251: mol_type = other DNA
atgcaccatcatcatcatcatggcggtagcggcatgaaagttctggtgattaattctggtagctcctccatcaaatatcagctcctcgatatgaccaacgaaaaggtattagcgaaaggcttggtcgagcgcattggcatcgacggttcgcgtatcgtgcataaagttaacggcgaaaaacacgtgctggaacatgagattaagaatcacgaaattggacttaaattggtcctggatcttcttacggacgaaaaatacggtgtgttgaaggatctcaaagaaatcgatgcagttgggcatcgcgtagtacatggcggcgagcgttttgccagtagcgtgaagattactgacgaagtcttaaagaccatcgagacgttgtcgttcttagctccgttacacaatccagcgaacattatgggtatcaagagcacctgtaaattattaccgggtgtgcctcaagttgccgtctttgatacagcgttccaccagaagatgccggagaaagcctatttgtacgcaatcccctatgagtactacgagaaatataaaattcgccgctatgggtttcatggaacctcacatcgttatgtgagtaaacgtgctgcggaaattatgggcaaaccgtacgatcagctcaagatcattaccgttcacgtgggtaacggcgcatcagttgcggcggtgaagaatggcgtatctgttgacacttccatgggtttcacaccacttgaaggtcttgtcatgggcacgcgcagcggcgatattgatccggccatcgtggaatttcttgagaaagaagaaggattgtcggccaaagaagtcgtcaacatcctcaacaagaaatctggtgtgtatgggctcaccaaaggctttagtagtgacatgcgtgacattgaagataatgctattgaaggtgatcctgtatgccgccttgcattcgatgtgtacgaatatcgtatcgcgaaatatattggcgcatacgctgcggccatgaacggtgttgacgcgatcgtctttaccgcaggagttggcgaaaatagcccgattatgcgcgaagaaattattgagaactacttgggctacttagggatcaagatcgataaagaagccaatgacttcaaaggtgaggagaagatcatttcaacgcccgattccaaagtgattgcgatggtagttccgaccaacgaggagctcatgatcgccaaagacacgaaagaaatcattgagaaagggttggacgagcttaagatc

SEQ ID NO: 70 - protein, 417 aa, synthetic construct
  REGION 1..417: note = Variant of acetate kinase
MHHHHHHGGSGMKVLVINSGSSSIKYQLLDMTNEKVLAKGLVERIGIDGSRIVHKVNGEKHVLEHEIKNHEIGLKLVLDLLTDEKYGVLKDLKEIDAVGHRVVHGGERFASSVKITDEVLKTIETLSFLAPLHNPANIMGIKSTCKLLPGVPQVAVFDTAFHQKMPEKAYLYAIPYEYYEKYKIRRYGFHGTSHRYVSKRAAEIMGKPYDQLKIITVHVGNGASVAAVKNGVSVDTSMGFTPLEGLVMGTRSGDIDPAIVEFLEKEEGLSAKEVVNILNKKSGVYGLTKGFSSDMRDIEDNAIEGDPVCRLAFDVYEYRIAKYIGAYAAAMNGVDAIVFTAGVGENSPIMREEIIENYLGYLGIKIDKEANDFKGEEKIISTPDSKVIAMVVPTNEELMIAKDTKEIIEKGLDELKI

SEQ ID NO: 71 - DNA, 1251 bp, synthetic construct
  misc_feature 1..1251: note = Variant of acetate kinase
  source 1..1251: mol_type = other DNA
atgcaccatcatcatcatcatggcggtagcggcatgaaagttctggtgattaattctggtagctcctccatcaaatatcagctcctcgatatgaccaacgaaaaggtattagcgaaaggcttggtcgagcgcattggcatcgacggttcgcgtatcgtgcataaagttaacggcgaaaaacacgtgctggaacatgagattaagaatcacgaaattggacttaaattggtcctggatcttcttacggacgaaaaatacggtgtgttgaaggatctcaaagaaatcgatgcagttgggcatcgcgtagtacatggcggcgagcgttttgccagtagcgtgaagattactgacgaagtcttaaagaccatcgagacgttgtcgttcttagctccgttacacaatccagcgaacattatgggtatcaagagcagcatgaaattattaccgggtgtgcctcaagttgccgtctttgatacagcgttccaccagaagatgccggagaaagcctatttgtacgcaatcccctatgagtactacgagaaatataaaattcgccgctatgggtttcatggaacctcacatcgttatgtgagtaaacgtgctgcggaaattatgggcaaaccgtacgatcagctcaagatcattaccgttcacgtgggtaacggcgcatcagttgcggcggtgaagaatggcgtatctgttgacacttccatgggtttcacaccacttgaaggtcttgtcatgggcacgcgcagcggcgatattgatccggccatcgtggaatttcttgagaaagaagaaggattgtcggccaaagaagtcgtcaacatcctcaacaagaaatctggtgtgtatgggctcaccaaaggctttagtagtgacatgcgtgacattgaagataatgctattgaaggtgatcctgtatgccgccttgcattcgatgtgtacgaatatcgtatcgcgaaatatattggcgcatacgctgcggccatgaacggtgttgacgcgatcgtctttaccgcaggagttggcgaaaatagcgtgattatgcgcgaagaaattattgagaactacttgggctacttagggatcaagatcgataaagaagccaatgacttcaaaggtgaggagaagatcatttcaacgcccgattccaaagtgattgcgatggtagttccgaccaacgaggagctcatgatcgccaaagacacgaaagaaatcattgagaaagggttggacgagcttaagatc

SEQ ID NO: 72 - protein, 417 aa, synthetic construct
  REGION 1..417: note = Variant of acetate kinase
MHHHHHHGGSGMKVLVINSGSSSIKYQLLDMTNEKVLAKGLVERIGIDGSRIVHKVNGEKHVLEHEIKNHEIGLKLVLDLLTDEKYGVLKDLKEIDAVGHRVVHGGERFASSVKITDEVLKTIETLSFLAPLHNPANIMGIKSSMKLLPGVPQVAVFDTAFHQKMPEKAYLYAIPYEYYEKYKIRRYGFHGTSHRYVSKRAAEIMGKPYDQLKIITVHVGNGASVAAVKNGVSVDTSMGFTPLEGLVMGTRSGDIDPAIVEFLEKEEGLSAKEVVNILNKKSGVYGLTKGFSSDMRDIEDNAIEGDPVCRLAFDVYEYRIAKYIGAYAAAMNGVDAIVFTAGVGENSVIMREEIIENYLGYLGIKIDKEANDFKGEEKIISTPDSKVIAMVVPTNEELMIAKDTKEIIEKGLDELKI

SEQ ID NO: 73 - DNA, 1251 bp, synthetic construct
  misc_feature 1..1251: note = Variant of acetate kinase
  source 1..1251: mol_type = other DNA
atgcaccatcatcatcatcatggcggtagcggcatgaaagttctggtgattaattctggtagctcctccatcaaatatcagctcctcgatatgaccaacgaaaaggtattagcgaaaggcttggtcgagcgcattggcatcgacggttcgcgtatcgtgcataaagttaacggcgaaaaacacgtgctggaacatgagattaagaatcacgaaattggacttaaattggtcctggatcttcttacggacgaaaaatacggtgtgttgaaggatctcaaagaaatcgatgcaggtgggcatcgcgtagtacatggcggcgagcgttttgccagtagcgtgaagattactgacgaagtcttaaagaccatcgagacgttgtcgttcttagctccgttacacaatccagcgaacattatgggtatcaagagcagcatgaaattattaccgggtgtgcctcaagttgccgtctttgatacagcgttccaccagaagatgccggagaaagcctatttgtacgcaatcccctatgagtactacgagaaatataaaattcgccgctatgggtttcatggaacctcacatcgttatgtgagtaaacgtgctgcggaaattatgggcaaaccgtacgatcagctcaagatcattaccgttcacgtgggtaacggcgcatcagttgcggcggtgaagaatggcgtatctgttgacacttccatgggtttcacaccacttgaaggtcttgtcatgggcacgcgcagcggcgatattgatccggccatcgtggaatttcttgagaaagaagaaggattgtcggccaaagaagtcgtcaacatcctcaacaagaaatctggtgtgtatgggctcaccaaaggctttagtagtgacatgcgtgacattgaagataatgctattgaaggtgatcctgtatgccgccttgcattcgatgtgtacgaatatcgtatcgcgaaatatattggcgcatacgctgcggccatgaacggtgttgacgcgatcgtctttaccgcaggagttggcgaaaatagcccgattatgcgcgaagaaattattgagaactacttgggctacttagggatcaagatcgataaagaagccaatgacttcaaaggtgaggagaagatcatttcaacgcccgattccaaagtgattgcgatggtagttccgaccaacgaggagctcatgatcgccaaagacacgaaagaaatcattgagaaagggttggacgagcttaagatc

SEQ ID NO: 74 - protein, 417 aa, synthetic construct
  REGION 1..417: note = Variant of acetate kinase
MHHHHHHGGSGMKVLVINSGSSSIKYQLLDMTNEKVLAKGLVERIGIDGSRIVHKVNGEKHVLEHEIKNHEIGLKLVLDLLTDEKYGVLKDLKEIDAGGHRVVHGGERFASSVKITDEVLKTIETLSFLAPLHNPANIMGIKSSMKLLPGVPQVAVFDTAFHQKMPEKAYLYAIPYEYYEKYKIRRYGFHGTSHRYVSKRAAEIMGKPYDQLKIITVHVGNGASVAAVKNGVSVDTSMGFTPLEGLVMGTRSGDIDPAIVEFLEKEEGLSAKEVVNILNKKSGVYGLTKGFSSDMRDIEDNAIEGDPVCRLAFDVYEYRIAKYIGAYAAAMNGVDAIVFTAGVGENSPIMREEIIENYLGYLGIKIDKEANDFKGEEKIISTPDSKVIAMVVPTNEELMIAKDTKEIIEKGLDELKI

SEQ ID NO: 75 - DNA, 1251 bp, synthetic construct
  misc_feature 1..1251: note = Variant of acetate kinase
  source 1..1251: mol_type = other DNA
atgcaccatcatcatcatcatggcggtagcggcatgaaagttctggtgattaattctggtagctcctccatcaaatatcagctcctcgatatgaccaacgaaaaggtattagcgaaaggcttggtcgagcgcattggcatcgacggttcgcgtatcgtgcataaagttaacggcgaaaaacacgtgctggaacatgagattaagaatcacgaaattggacttaaattggtcctggatcttcttacggacgaaaaatacggtgtgttgaaggatctcaaagaaatcgatgcagttgggcatcgcgtagtacatggcggcgagcgttttgccagtagcgtgaagattactgacgaagtcttaaagaccatcgagacgttgtcgttcttagctccgttacacaatccagcgaacattatgggtatcaagagctgtatgaaattattaccgggtgtgcctcaagttgccgtctttgatacagcgttccaccagaagatgccggagaaagcctatttgtacgcaatcccctatgagtactacgagaaatataaaattcgccgctatgggtttcatggaacctcacatcgttatgtgagtaaacgtgctgcggaaattatgggcaaaccgtacgatcagctcaagatcattaccgttcacgtgggtaacggcgcatcagttgcggcggtgaagaatggcgtatctgttgacacttccatgggtttcacaccacttgaaggtcttgtcatgggcacgcgcagcggcgatattgatccggccatcgtggaatttcttgagaaagaagaaggattgtcggccaaagaagtcgtcaacatcctcaacaagaaatctggtgtgtatgggctcaccaaaggctttagtagtgacatgcgtgacattgaagataatgctattgaaggtgatcctgtatgccgccttgcattcgatgtgtacgaatatcgtatcgcgaaatatattggcgcatacgctgcggccatgaacggtgttgacgcgatcgtctttaccgcaggagttggcgaaaatagcccgattatgcgcgaagaaattattgagaactacttgggctacttagggatcaagatcgataaagaagccaatgacttcaaaggtgaggagaagatcatttcaacgcccgattccaaagtgattgcgatggtagttccgaccaacgaggagctcatgatcgccaaagacacgaaagaaatcattgagaaagggttggacgagcttaagatc

SEQ ID NO: 76 - protein, 417 aa, synthetic construct
  REGION 1..417: note = Variant of acetate kinase
MHHHHHHGGSGMKVLVINSGSSSIKYQLLDMTNEKVLAKGLVERIGIDGSRIVHKVNGEKHVLEHEIKNHEIGLKLVLDLLTDEKYGVLKDLKEIDAVGHRVVHGGERFASSVKITDEVLKTIETLSFLAPLHNPANIMGIKSCMKLLPGVPQVAVFDTAFHQKMPEKAYLYAIPYEYYEKYKIRRYGFHGTSHRYVSKRAAEIMGKPYDQLKIITVHVGNGASVAAVKNGVSVDTSMGFTPLEGLVMGTRSGDIDPAIVEFLEKEEGLSAKEVVNILNKKSGVYGLTKGFSSDMRDIEDNAIEGDPVCRLAFDVYEYRIAKYIGAYAAAMNGVDAIVFTAGVGENSPIMREEIIENYLGYLGIKIDKEANDFKGEEKIISTPDSKVIAMVVPTNEELMIAKDTKEIIEKGLDELKI

SEQ ID NO: 77 - DNA, 1251 bp, synthetic construct
  misc_feature 1..1251: note = Variant of acetate kinase
  source 1..1251: mol_type = other DNA
atgcaccatcatcatcatcatggcggtagcggcatgaaagttctggtgattaattctggtagctcctccatcaaatatcagctcctcgatatgaccaacgaaaaggtattagcgaaaggcttggtcgagcgcattggcatcgacggttcgcgtatcgtgcataaagttaacggcgaaaaacacgtgctggaacatgagattaagaatcacgaaattggacttcatttggtcctggatcttcttacggacgaaaaatacggtgtgttgaaggatctcaaagaaatcgatgcagttgggcatcgcgtagtacatggcggcgagcgttttgccagtagcgtgaagattactgacgaagtcttaaagaccatcgagacgttgtcgttcttagctccgttacacaatccagcgaacattatgggtatcaagagcagcatgaaattattaccgggtgtgcctcaagttgccgtctttgatacagcgttccaccagaagatgccggagaaagcctatttgtacgcaatcccctatgagtactacgagaaatataaaattcgccgctatgggtttcatggaacctcacatcgttatgtgagtaaacgtgctgcggaaattatgggcaaaccgtacgatcagctcaagatcattaccgttcacgtgggtaacggcgcatcagttgcggcggtgaagaatggcgtatctgttgacacttccatgggtttcacaccacttgaaggtcttgtcatgggcacgcgcagcggcgatattgatccggccatcgtggaatttcttgagaaagaagaaggattgtcggccaaagaagtcgtcaacatcctcaacaagaaatctggtgtgtatgggctcaccaaaggctttagtagtgacatgcgtgacattgaagataatgctattgaaggtgatcctgtatgccgccttgcattcgatgtgtacgaatatcgtatcgcgaaatatattggcgcatacgctgcggccatgaacggtgttgacgcgatcgtctttaccgcaggagttggcgaaaatagcccgattatgcgcgaagaaattattgagaactacttgggctacttagggatcaagatcgataaagaagccaatgacttcaaaggtgaggagaagatcatttcaacgcccgattccaaagtgattgcgatggtagttccgaccaacgaggagctcatgatcgccaaagacacgaaagaaatcattgagaaagggttggacgagcttaagatc

SEQ ID NO: 78 - protein, 417 aa, synthetic construct
  REGION 1..417: note = Variant of acetate kinase
MHHHHHHGGSGMKVLVINSGSSSIKYQLLDMTNEKVLAKGLVERIGIDGSRIVHKVNGEKHVLEHEIKNHEIGLHLVLDLLTDEKYGVLKDLKEIDAVGHRVVHGGERFASSVKITDEVLKTIETLSFLAPLHNPANIMGIKSSMKLLPGVPQVAVFDTAFHQKMPEKAYLYAIPYEYYEKYKIRRYGFHGTSHRYVSKRAAEIMGKPYDQLKIITVHVGNGASVAAVKNGVSVDTSMGFTPLEGLVMGTRSGDIDPAIVEFLEKEEGLSAKEVVNILNKKSGVYGLTKGFSSDMRDIEDNAIEGDPVCRLAFDVYEYRIAKYIGAYAAAMNGVDAIVFTAGVGENSPIMREEIIENYLGYLGIKIDKEANDFKGEEKIISTPDSKVIAMVVPTNEELMIAKDTKEIIEKGLDELKI

SEQ ID NO: 79 - DNA, 1251 bp, synthetic construct
  misc_feature 1..1251: note = Variant of acetate kinase
  source 1..1251: mol_type = other DNA
atgcaccatcatcatcatcatggcggtagcggcatgaaagttctggtgattaattctggtagctcctccatcaaaggtcagctcctcgatatgaccaacgaaaaggtattagcgaaaggcttggtcgagcgcattggcatcgacggttcgcgtatcgtgcataaagttaacggcgaaaaacacgtgctggaacatgagattaagaatcacgaaattggacttaaattggtcctggatcttcttacggacgaaaaatacggtgtgttgaaggatctcaaagaaatcgatgcagttgggcatcgcgtagtacatggcggcgagcgttttgccagtagcgtgaagattactgacgaagtcttaaagaccatcgagacgttgtcgttcttagctccgttacacaatccagcgaacattatgggtatcaagagcagcatgaaattattaccgggtgtgcctcaagttgccgtctttgatacagcgttccaccagaagatgccggagaaagcctatttgtacgcaatcccctatgagtactacgagaaatataaaattcgccgctatgggtttcatggaacctcacatcgttatgtgagtaaacgtgctgcggaaattatgggcaaaccgtacgatcagctcaagatcattaccgttcacgtgggtaacggcgcatcagttgcggcggtgaagaatggcgtatctgttgacacttccatgggtttcacaccacttgaaggtcttgtcatgggcacgcgcagcggcgatattgatccggccatcgtggaatttcttgagaaagaagaaggattgtcggccaaagaagtcgtcaacatcctcaacaagaaatctggtgtgtatgggctcaccaaaggctttagtagtgacatgcgtgacattgaagataatgctattgaaggtgatcctgtatgccgccttgcattcgatgtgtacgaatatcgtatcgcgaaatatattggcgcatacgctgcggccatgaacggtgttgacgcgatcgtctttaccgcaggagttggcgaaaatagcccgattatgcgcgaagaaattattgagaactacttgggctacttagggatcaagatcgataaagaagccaatgacttcaaaggtgaggagaagatcatttcaacgcccgattccaaagtgattgcgatggtagttccgaccaacgaggagctcatgatcgccaaagacacgaaagaaatcattgagaaagggttggacgagcttaagatc

SEQ ID NO: 80 - protein, 417 aa, synthetic construct
  REGION 1..417: note = Variant of acetate kinase
MHHHHHHGGSGMKVLVINSGSSSIKGQLLDMTNEKVLAKGLVERIGIDGSRIVHKVNGEKHVLEHEIKNHEIGLKLVLDLLTDEKYGVLKDLKEIDAVGHRVVHGGERFASSVKITDEVLKTIETLSFLAPLHNPANIMGIKSSMKLLPGVPQVAVFDTAFHQKMPEKAYLYAIPYEYYEKYKIRRYGFHGTSHRYVSKRAAEIMGKPYDQLKIITVHVGNGASVAAVKNGVSVDTSMGFTPLEGLVMGTRSGDIDPAIVEFLEKEEGLSAKEVVNILNKKSGVYGLTKGFSSDMRDIEDNAIEGDPVCRLAFDVYEYRIAKYIGAYAAAMNGVDAIVFTAGVGENSPIMREEIIENYLGYLGIKIDKEANDFKGEEKIISTPDSKVIAMVVPTNEELMIAKDTKEIIEKGLDELKI

SEQ ID NO: 81 - DNA, 1251 bp, synthetic construct
  misc_feature 1..1251: note = Variant of acetate kinase
  source 1..1251: mol_type = other DNA
atgcaccatcatcatcatcatggcggtagcggcatgaaagttctggtgattaattctggtagctcctccatcaaatatcagctcctcgatatgaccaacgaaaaggtattagcgaaaggcttggtcgagcgcattggcatcgacggttcgcgtatcgtgcataaagttaacggcgaaaaacacgtgctggaacatgggattaagaatcacgaaattggacttaaattggtcctggatcttcttacggacgaaaaatacggtgtgttgaaggatctcaaagaaatcgatgcagttgggcatcgcgtagtacatggcggcgagcgttttgccagtagcgtgaagattactgacgaagtcttaaagaccatcgagacgttgtcgttcttagctccgttacacaatccagcgaacattatgggtatcaagagcagcatgaaattattaccgggtgtgcctcaagttgccgtctttgatacagcgttccaccagaagatgccggagaaagcctatttgtacgcaatcccctatgagtactacgagaaatataaaattcgccgctatgggtttcatggaacctcacatcgttatgtgagtaaacgtgctgcggaaattatgggcaaaccgtacgatcagctcaagatcattaccgttcacgtgggtaacggcgcatcagttgcggcggtgaagaatggcgtatctgttgacacttccatgggtttcacaccacttgaaggtcttgtcatgggcacgcgcagcggcgatattgatccggccatcgtggaatttcttgagaaagaagaaggattgtcggccaaagaagtcgtcaacatcctcaacaagaaatctggtgtgtatgggctcaccaaaggctttagtagtgacatgcgtgacattgaagataatgctattgaaggtgatcctgtatgccgccttgcattcgatgtgtacgaatatcgtatcgcgaaatatattggcgcatacgctgcggccatgaacggtgttgacgcgatcgtctttaccgcaggagttggcgaaaatagcccgattatgcgcgaagaaattattgagaactacttgggctacttagggatcaagatcgataaagaagccaatgacttcaaaggtgaggagaagatcatttcaacgcccgattccaaagtgattgcgatggtagttccgaccaacgaggagctcatgatcgccaaagacacgaaagaaatcattgagaaagggttggacgagcttaagatc

SEQ ID NO: 82 - protein, 417 aa, synthetic construct
  REGION 1..417: note = Variant of acetate kinase
MHHHHHHGGSGMKVLVINSGSSSIKYQLLDMTNEKVLAKGLVERIGIDGSRIVHKVNGEKHVLEHGIKNHEIGLKLVLDLLTDEKYGVLKDLKEIDAVGHRVVHGGERFASSVKITDEVLKTIETLSFLAPLHNPANIMGIKSSMKLLPGVPQVAVFDTAFHQKMPEKAYLYAIPYEYYEKYKIRRYGFHGTSHRYVSKRAAEIMGKPYDQLKIITVHVGNGASVAAVKNGVSVDTSMGFTPLEGLVMGTRSGDIDPAIVEFLEKEEGLSAKEVVNILNKKSGVYGLTKGFSSDMRDIEDNAIEGDPVCRLAFDVYEYRIAKYIGAYAAAMNGVDAIVFTAGVGENSPIMREEIIENYLGYLGIKIDKEANDFKGEEKIISTPDSKVIAMVVPTNEELMIAKDTKEIIEKGLDELKI

SEQ ID NO: 83 - DNA, 1251 bp, synthetic construct
  misc_feature 1..1251: note = Variant of acetate kinase
  source 1..1251: mol_type = other DNA
atgcaccatcatcatcatcatggcggtagcggcatgaaagttctggtgattaattctggtagctcctccatcaaatatcagctcctcgatatgaccaacgaaaaggtattagcgaaaggcttggtcgagcgcattggcatcgacggttcgcgtatcgtgcataaagttaacggcgaaaaacacgtgctggaacatgagattaagaatcacgaaattggacttaaattggtcctggatcttcttacggacgaaaaatacggtgtgttgaaggatctcaaagaaatcgatgcagttgggcatcgcgtagtacatggcggcgagcgttttgccagtagcgtgaagattactgacgaagtcttaaagaccatcgagacgttgtcgttcttagctccgttacacaatccagcgaacctgatgggtatcaagagcagcatgaaattattaccgggtgtgcctcaagttgccgtctttgatacagcgttccaccagaagatgccggagaaagcctatttgtacgcaatcccctatgagtactacgagaaatataaaattcgccgctatgggtttcatggaacctcacatcgttatgtgagtaaacgtgctgcggaaattatgggcaaaccgtacgatcagctcaagatcattaccgttcacgtgggtaacggcgcatcagttgcggcggtgaagaatggcgtatctgttgacacttccatgggtttcacaccacttgaaggtcttgtcatgggcacgcgcagcggcgatattgatccggccatcgtggaatttcttgagaaagaagaaggattgtcggccaaagaagtcgtcaacatcctcaacaagaaatctggtgtgtatgggctcaccaaaggctttagtagtgacatgcgtgacattgaagataatgctattgaaggtgatcctgtatgccgccttgcattcgatgtgtacgaatatcgtatcgcgaaatatattggcgcatacgctgcggccatgaacggtgttgacgcgatcgtctttaccgcaggagttggcgaaaatagcccgattatgcgcgaagaaattattgagaactacttgggctacttggggatcaagatcgataaagaagccaatgacttcaaaggtgaggagaagatcatttcaacgcccgattccaaagtgattgcgatggtagttccgaccaacgaggagctcatgatcgccaaagacacgaaagaaatcattgagaaagggttggacgagcttaagatc

SEQ ID NO: 84 - protein, 417 aa, synthetic construct
  REGION 1..417: note = Variant of acetate kinase
MHHHHHHGGSGMKVLVINSGSSSIKYQLLDMTNEKVLAKGLVERIGIDGSRIVHKVNGEKHVLEHEIKNHEIGLKLVLDLLTDEKYGVLKDLKEIDAVGHRVVHGGERFASSVKITDEVLKTIETLSFLAPLHNPANLMGIKSSMKLLPGVPQVAVFDTAFHQKMPEKAYLYAIPYEYYEKYKIRRYGFHGTSHRYVSKRAAEIMGKPYDQLKIITVHVGNGASVAAVKNGVSVDTSMGFTPLEGLVMGTRSGDIDPAIVEFLEKEEGLSAKEVVNILNKKSGVYGLTKGFSSDMRDIEDNAIEGDPVCRLAFDVYEYRIAKYIGAYAAAMNGVDAIVFTAGVGENSPIMREEIIENYLGYLGIKIDKEANDFKGEEKIISTPDSKVIAMVVPTNEELMIAKDTKEIIEKGLDELKI

SEQ ID NO: 85 - DNA, 1251 bp, synthetic construct
  misc_feature 1..1251: note = Variant of acetate kinase
  source 1..1251: mol_type = other DNA
atgcaccatcatcatcatcatggcggtagcggcatgaaagttctggtgattaattctggtagctcctccatcaaatatcagctcctcgatatgaccaacgaaaaggtattagcgaaaggcttggtcgagcgcattggcatcgacaggtcgcgtatcgtgcataaagttaacggcgaaaaacacgtgctggaacatgagattaagaatcacgaaattggacttaaattggtcctggatcttcttacggacgaaaaatacggtgtgttgaaggatctcaaagaaatcgatgcagttgggcatcgcgtagtacatggcggcgagcgttttgccagtagcgtgaagattactgacgaagtcttaaagaccatcgagacgttgtcgttcttagctccgttacacaatccagcgaacattatgggtatcaagagcagcatgaaattattaccgggtgtgcctcaagttgccgtctttgatacagcgttccaccagaagatgccggagaaagcctatttgtacgcaatcccctatgagtactacgagaaatataaaattcgccgctatgggtttcatggaacctcacatcgttatgtgagtaaacgtgctgcggaaattatgggcaaaccgtacgatcagctcaagatcattaccgttcacgtgggtaacggcgcatcagttgcggcggtgaagaatggcgtatctgttgacacttccatgggtttcacaccacttgaaggtcttgtcatgggcacgcgcagcggcgatattgatccggccatcgtggaatttcttgagaaagaagaaggattgtcggccaaagaagtcgtcaacatcctcaacaagaaatctggtgtgtatgggctcaccaaaggctttagtagtgacatgcgtgacattgaagataatgctattgaaggtgatcctgtatgccgccttgcattcgatgtgtacgaatatcgtatcgcgaaatatattggcgcatacgctgcggccatgaacggtgttgacgcgatcgtctttaccgcaggagttggcgaaaatagcccgattatgcgcgaagaaattattgagaactacttgggctacttagggatcaagatcgataaagaagccaatgacttcaaaggtgaggagaagatcatttcaacgcccgattccaaagtgattgcgatggtagttccgaccaacgaggagctcatgatcgccaaagacacgaaagaaatcattgagaaagggttggacgagcttaagatc

SEQ ID NO: 86 - protein, 417 aa, synthetic construct
  REGION 1..417: note = Variant of acetate kinase
MHHHHHHGGSGMKVLVINSGSSSIKYQLLDMTNEKVLAKGLVERIGIDRSRIVHKVNGEKHVLEHEIKNHEIGLKLVLDLLTDEKYGVLKDLKEIDAVGHRVVHGGERFASSVKITDEVLKTIETLSFLAPLHNPANIMGIKSSMKLLPGVPQVAVFDTAFHQKMPEKAYLYAIPYEYYEKYKIRRYGFHGTSHRYVSKRAAEIMGKPYDQLKIITVHVGNGASVAAVKNGVSVDTSMGFTPLEGLVMGTRSGDIDPAIVEFLEKEEGLSAKEVVNILNKKSGVYGLTKGFSSDMRDIEDNAIEGDPVCRLAFDVYEYRIAKYIGAYAAAMNGVDAIVFTAGVGENSPIMREEIIENYLGYLGIKIDKEANDFKGEEKIISTPDSKVIAMVVPTNEELMIAKDTKEIIEKGLDELKI

SEQ ID NO: 87 - DNA, 1251 bp, synthetic construct
  misc_feature 1..1251: note = Variant of acetate kinase
  source 1..1251: mol_type = other DNA
atgcaccatcatcatcatcatggcggtagcggcatgaaagttctggtgattaattctggtagctcctccatcaaatatcagctcctcgatatgaccaacgaaaaggtattagcgaaaggcttggtcgagcgcattggcatcgacggttcgcgtatcgtgcataaagttaacggcgaaaaacacgtgctggaacatcgtattaagaatcacgaaattggacttaaattggtcctggatcttcttacggacgaaaaatacggtgtgttgaaggatctcaaagaaatcgatgcagttgggcatcgcgtagtacatggcggcgagcgttttgccagtagcgtgaagattactgacgaagtcttaaagaccatcgagacgttgtcgttcttagctccgttacacaatccagcgaacattatgggtatcaagagcagcatgaaattattaccgggtgtgcctcaagttgccgtctttgatacagcgttccaccagaagatgccggagaaagcctatttgtacgcaatcccctatgagtactacgagaaatataaaattcgccgctatgggtttcatggaacctcacatcgttatgtgagtaaacgtgctgcggaaattatgggcaaaccgtacgatcagctcaagatcattaccgttcacgtgggtaacggcgcatcagttgcggcggtgaagaatggcgtatctgttgacacttccatgggtttcacaccacttgaaggtcttgtcatgggcacgcgcagcggcgatattgatccggccatcgtggaatttcttgagaaagaagaaggattgtcggccaaagaagtcgtcaacatcctcaacaagaaatctggtgtgtatgggctcaccaaaggctttagtagtgacatgcgtgacattgaagataatgctattgaaggtgatcctgtatgccgccttgcattcgatgtgtacgaatatcgtatcgcgaaatatattggcgcatacgctgcggccatgaacggtgttgacgcgatcgtctttaccgcaggagttggcgaaaatagcccgattatgcgcgaagaaattattgagaactacttgggctacttagggatcaagatcgataaagaagccaatgacttcaaaggtgaggagaagatcatttcaacgcccgattccaaagtgattgcgatggtagttccgaccaacgaggagctcatgatcgccaaagacacgaaagaaatcattgagaaagggttggacgagcttaagatc

SEQ ID NO: 88 - protein, 417 aa, synthetic construct
  REGION 1..417: note = Variant of acetate kinase
MHHHHHHGGSGMKVLVINSGSSSIKYQLLDMTNEKVLAKGLVERIGIDGSRIVHKVNGEKHVLEHRIKNHEIGLKLVLDLLTDEKYGVLKDLKEIDAVGHRVVHGGERFASSVKITDEVLKTIETLSFLAPLHNPANIMGIKSSMKLLPGVPQVAVFDTAFHQKMPEKAYLYAIPYEYYEKYKIRRYGFHGTSHRYVSKRAAEIMGKPYDQLKIITVHVGNGASVAAVKNGVSVDTSMGFTPLEGLVMGTRSGDIDPAIVEFLEKEEGLSAKEVVNILNKKSGVYGLTKGFSSDMRDIEDNAIEGDPVCRLAFDVYEYRIAKYIGAYAAAMNGVDAIVFTAGVGENSPIMREEIIENYLGYLGIKIDKEANDFKGEEKIISTPDSKVIAMVVPTNEELMIAKDTKEIIEKGLDELKI

SEQ ID NO: 89 - DNA, 1251 bp, synthetic construct
  misc_feature 1..1251: note = Variant of acetate kinase
  source 1..1251: mol_type = other DNA
atgcaccatcatcatcatcatggcggtagcggcatgaaagttctggtgattaattctggtagctcctccatcaaatatcagctcctcgatatgaccaacgaaaaggtattagcgaaaggcttggtcgagcgcattggcatcgacggttcgcgtatcgtgcataaagttaacggcgaaaaacacgtgctggaacatgagattaagaatcacgaaattggacttaaattggtcctggatcttcttacggacgaaaaatacggtgtgttgaaggatctcaaagaaatcgatgcagttgggcatcgcgtagtacatggcggcgagcgttttgccagtagcgtgaagattactgacgaagtcttaaagaccatcgagacgttgtcgttcttagctccgttacacaatccagcgaacattatgggtatcaagagcagcatgaaattattaccgggtgtgcctcaagttgccgtcctggatacagcgttccaccagaagatgccggagaaagcctatttgtacgcaatcccctatgagtactacgagaaatataaaattcgccgctatgggtttcatggaacctcacatcgttatgtgagtaaacgtgctgcggaaattatgggcaaaccgtacgatcagctcaagatcattaccgttcacgtgggtaacggcgcatcagttgcggcggtgaagaatggcgtatctgttgacacttccatgggtttcacaccacttgaaggtcttgtcatgggcacgcgcagcggcgatattgatccggccatcgtggaatttcttgagaaagaagaaggattgtcggccaaagaagtcgtcaacatcctcaacaagaaatctggtgtgtatgggctcaccaaaggctttagtagtgacatgcgtgacattgaagataatgctattgaaggtgatcctgtatgccgccttgcattcgatgtgtacgaatatcgtatcgcgaaatatattggcgcatacgctgcggccatgaacggtgttgacgcgatcgtctttaccgcaggagttggcgaaaatagcccgattatgcgcgaagaaattattgagaactacttgggctacttagggatcaagatcgataaagaagccaatgacttcaaaggtgaggagaagatcatttcaacgcccgattccaaagtgattgcgatggtagttccgaccaacgaggagctcatgatcgccaaagacacgaaagaaatcattgagaaagggttggacgagcttaagatc

SEQ ID NO: 90 - protein, 417 aa, synthetic construct
  REGION 1..417: note = Variant of acetate kinase
MHHHHHHGGSGMKVLVINSGSSSIKYQLLDMTNEKVLAKGLVERIGIDGSRIVHKVNGEKHVLEHEIKNHEIGLKLVLDLLTDEKYGVLKDLKEIDAVGHRVVHGGERFASSVKITDEVLKTIETLSFLAPLHNPANIMGIKSSMKLLPGVPQVAVLDTAFHQKMPEKAYLYAIPYEYYEKYKIRRYGFHGTSHRYVSKRAAEIMGKPYDQLKIITVHVGNGASVAAVKNGVSVDTSMGFTPLEGLVMGTRSGDIDPAIVEFLEKEEGLSAKEVVNILNKKSGVYGLTKGFSSDMRDIEDNAIEGDPVCRLAFDVYEYRIAKYIGAYAAAMNGVDAIVFTAGVGENSPIMREEIIENYLGYLGIKIDKEANDFKGEEKIISTPDSKVIAMVVPTNEELMIAKDTKEIIEKGLDELKI

SEQ ID NO: 91 - DNA, 1251 bp, synthetic construct
  misc_feature 1..1251: note = Variant of acetate kinase
  source 1..1251: mol_type = other DNA
atgcaccatcatcatcatcatggcggtagcggcatgaaagttctggtgattaattctggtagctcctccatcaaatatcagctcctcgatatgaccaacgaaaaggtattagcgaaaggcttggtcgagcgcattggcatcgacggttcgcgtatcgtgcataaagttaacggcgaaaaacacgtgctggaacatgagattaagaatcacgaaattggacttaaattggtcctggatcttcttacggacgaaaaatacggtgtgttgaaggatctcaaagaaatcgatgcagttgggcatcgcgtagtacatggcggcgagcgttttgccagtagcgtgaagattactgacgaagtcttaaagaccatcgagacgttgtcgttcttagctccgttacacaatccagcgaacattatgggtatcaagagcagcatgaaattattaccgggtgtgcctcaagttgccatgtttgatacagcgttccaccagaagatgccggagaaagcctatttgtacgcaatcccctatgagtactacgagaaatataaaattcgccgctatgggtttcatggaacctcacatcgttatgtgagtaaacgtgctgcggaaattatgggcaaaccgtacgatcagctcaagatcattaccgttcacgtgggtaacggcgcatcagttgcggcggtgaagaatggcgtatctgttgacacttccatgggtttcacaccacttgaaggtcttgtcatgggcacgcgcagcggcgatattgatccggccatcgtggaatttcttgagaaagaagaaggattgtcggccaaagaagtcgtcaacatcctcaacaagaaatctggtgtgtatgggctcaccaaaggctttagtagtgacatgcgtgacattgaagataatgctattgaaggtgatcctgtatgccgccttgcattcgatgtgtacgaatatcgtatcgcgaaatatattggcgcatacgctgcggccatgaacggtgttgacgcgatcgtctttaccgcaggagttggcgaaaatagcccgattatgcgcgaagaaattattgagaactacttgggctacttagggatcaagatcgataaagaagccaatgacttcaaaggtgaggagaagatcatttcaacgcccgattccaaagtgattgcgatggtagttccgaccaacgaggagctcatgatcgccaaagacacgaaagaaatcattgagaaagggttggacgagcttaagatc

SEQ ID NO: 92 - protein, 417 aa, synthetic construct
  REGION 1..417: note = Variant of acetate kinase
MHHHHHHGGSGMKVLVINSGSSSIKYQLLDMTNEKVLAKGLVERIGIDGSRIVHKVNGEKHVLEHEIKNHEIGLKLVLDLLTDEKYGVLKDLKEIDAVGHRVVHGGERFASSVKITDEVLKTIETLSFLAPLHNPANIMGIKSSMKLLPGVPQVAMFDTAFHQKMPEKAYLYAIPYEYYEKYKIRRYGFHGTSHRYVSKRAAEIMGKPYDQLKIITVHVGNGASVAAVKNGVSVDTSMGFTPLEGLVMGTRSGDIDPAIVEFLEKEEGLSAKEVVNILNKKSGVYGLTKGFSSDMRDIEDNAIEGDPVCRLAFDVYEYRIAKYIGAYAAAMNGVDAIVFTAGVGENSPIMREEIIENYLGYLGIKIDKEANDFKGEEKIISTPDSKVIAMVVPTNEELMIAKDTKEIIEKGLDELKI

SEQ ID NO: 93 - DNA, 1251 bp, synthetic construct
  misc_feature 1..1251: note = Variant of acetate kinase
  source 1..1251: mol_type = other DNA
atgcaccatcatcatcatcatggcggtagcggcatgaaagttctggtgattaattctggtagctcctccatcaaatatcagctcctcgatatgaccaacgaaaaggtattagcgaaaggcttggtcgagcgcattggcatcgacggttcgcgtatcgtgcataaagttaacggcgaaaaacacgtgctggaacatgagattaagaatcacgaaattggacttaaattggtcctggatcttcttacggacgaaaaatacggtgtgttgaaggatctcaaagaaatcgatgcagttgggcatcgcgtagtacatggcggcgagcgttttgccagtagcgtgaagattactgacgaagtcttaaagaccatcgagacgttgtcgttcttagctccgttacacaatccagcgaacattatgggtatcaagagcagcatgaaaggtttaccgggtgtgcctcaagttgccgtctttgatacagcgttccaccagaagatgccggagaaagcctatttgtacgcaatcccctatgagtactacgagaaatataaaattcgccgctatgggtttcatggaacctcacatcgttatgtgagtaaacgtgctgcggaaattatgggcaaaccgtacgatcagctcaagatcattaccgttcacgtgggtaacggcgcatcagttgcggcggtgaagaatggcgtatctgttgacacttccatgggtttcacaccacttgaaggtcttgtcatgggcacgcgcagcggcgatattgatccggccatcgtggaatttcttgagaaagaagaaggattgtcggccaaagaagtcgtcaacatcctcaacaagaaatctggtgtgtatgggctcaccaaaggctttagtagtgacatgcgtgacattgaagataatgctattgaaggtgatcctgtatgccgccttgcattcgatgtgtacgaatatcgtatcgcgaaatatattggcgcatacgctgcggccatgaacggtgttgacgcgatcgtctttaccgcaggagttggcgaaaatagcccgattatgcgcgaagaaattattgagaactacttgggctacttagggatcaagatcgataaagaagccaatgacttcaaaggtgaggagaagatcatttcaacgcccgattccaaagtgattgcgatggtagttccgaccaacgaggagctcatgatcgccaaagacacgaaagaaatcattgagaaagggttggacgagcttaagatc

SEQ ID NO: 94 - protein, 417 aa, synthetic construct
  REGION 1..417: note = Variant of acetate kinase
MHHHHHHGGSGMKVLVINSGSSSIKYQLLDMTNEKVLAKGLVERIGIDGSRIVHKVNGEKHVLEHEIKNHEIGLKLVLDLLTDEKYGVLKDLKEIDAVGHRVVHGGERFASSVKITDEVLKTIETLSFLAPLHNPANIMGIKSSMKGLPGVPQVAVFDTAFHQKMPEKAYLYAIPYEYYEKYKIRRYGFHGTSHRYVSKRAAEIMGKPYDQLKIITVHVGNGASVAAVKNGVSVDTSMGFTPLEGLVMGTRSGDIDPAIVEFLEKEEGLSAKEVVNILNKKSGVYGLTKGFSSDMRDIEDNAIEGDPVCRLAFDVYEYRIAKYIGAYAAAMNGVDAIVFTAGVGENSPIMREEIIENYLGYLGIKIDKEANDFKGEEKIISTPDSKVIAMVVPTNEELMIAKDTKEIIEKGLDELKI

SEQ ID NO: 95 - DNA, 1251 bp, synthetic construct
  misc_feature 1..1251: note = Variant of acetate kinase
  source 1..1251: mol_type = other DNA
atgcaccatcatcatcatcatggcggtagcggcatgaaagttctggtgattaattctggtagctcctccatcaaatatcagctcctcgatatgaccaacgaaaaggtattagcgaaaggcttggtcgagcgcattggcatcgacggttcgcgtatcgtgcataaagttaacggcgaaaaacacgtgctggaacatgagattaagaatcacgaaattggacttaaattggtcctggatcttcttacggacgaaaaatacggtgtgttgaaggatctcaaagaaatcgatgcagttgggcatcgcgtagtacatggcggcgagcgttttgccagtagcgtgaagtatactgacgaagtcttaaagaccatcgagacgttgtcgttcttagctccgttacacaatccagcgaacattatgggtatcaagagcagcatgaaattattaccgggtgtgcctcaagttgccgtctttgatacagcgttccaccagaagatgccggagaaagcctatttgtacgcaatcccctatgagtactacgagaaatataaaattcgccgctatgggtttcatggaacctcacatcgttatgtgagtaaacgtgctgcggaaattatgggcaaaccgtacgatcagctcaagatcattaccgttcacgtgggtaacggcgcatcagttgcggcggtgaagaatggcgtatctgttgacacttccatgggtttcacaccacttgaaggtcttgtcatgggcacgcgcagcggcgatattgatccggccatcgtggaatttcttgagaaagaagaaggattgtcggccaaagaagtcgtcaacatcctcaacaagaaatctggtgtgtatgggctcaccaaaggctttagtagtgacatgcgtgacattgaagataatgctattgaaggtgatcctgtatgccgccttgcattcgatgtgtacgaatatcgtatcgcgaaatatattggcgcatacgctgcggccatgaacggtgttgacgcgatcgtctttaccgcaggagttggcgaaaatagcccgattatgcgcgaagaaattattgagaactacttgggctacttagggatcaagatcgataaagaagccaatgacttcaaaggtgaggagaagatcatttcaacgcccgattccaaagtgattgcgatggtagttccgaccaacgaggagctcatgatcgccaaagacacgaaagaaatcattgagaaagggttggacgagcttaagatc

SEQ ID NO: 96 - protein, 417 aa, synthetic construct
  REGION 1..417: note = Variant of acetate kinase
MHHHHHHGGSGMKVLVINSGSSSIKYQLLDMTNEKVLAKGLVERIGIDGSRIVHKVNGEKHVLEHEIKNHEIGLKLVLDLLTDEKYGVLKDLKEIDAVGHRVVHGGERFASSVKYTDEVLKTIETLSFLAPLHNPANIMGIKSSMKLLPGVPQVAVFDTAFHQKMPEKAYLYAIPYEYYEKYKIRRYGFHGTSHRYVSKRAAEIMGKPYDQLKIITVHVGNGASVAAVKNGVSVDTSMGFTPLEGLVMGTRSGDIDPAIVEFLEKEEGLSAKEVVNILNKKSGVYGLTKGFSSDMRDIEDNAIEGDPVCRLAFDVYEYRIAKYIGAYAAAMNGVDAIVFTAGVGENSPIMREEIIENYLGYLGIKIDKEANDFKGEEKIISTPDSKVIAMVVPTNEELMIAKDTKEIIEKGLDELKI

SEQ ID NO: 97 - DNA, 1251 bp, synthetic construct
  misc_feature 1..1251: note = Variant of acetate kinase
  source 1..1251: mol_type = other DNA
atgcaccatcatcatcatcatggcggtagcggcatgaaagttctggtgattaattctggtagctcctccatcaaatatcagctcctcgatatgaccaacgaaaaggtattagcgaaaggcttggtcgagcgcattggcatcgacggttcgcgtatcgtgcataaagttaacggcgaaaaacacgtgctggaacatgagattaagaatcacgaaattggacttaaattggtcctggatcttcttacggacgaaaaatacggtgtgttgaaggatctcaaagaaatcgatgcagttgggcatcgcgtagtacatggcggcgagcgttttgccagtagcgtgaagattactgacgaagtcttaaagaccatcgagacgttgtcgttcttagctccgttacacaatccaaagaacattatgggtatcaagagcagcatgaaattattaccgggtgtgcctcaagttgccgtctttgatacagcgttccaccagaagatgccggagaaagcctatttgtacgcaatcccctatgagtactacgagaaatataaaattcgccgctatgggtttcatggaacctcacatcgttatgtgagtaaacgtgctgcggaaattatgggcaaaccgtacgatcagctcaagatcattaccgttcacgtgggtaacggcgcatcagttgcggcggtgaagaatggcgtatctgttgacacttccatgggtttcacaccacttgaaggtcttgtcatgggcacgcgcagcggcgatattgatccggccatcgtggaatttcttgagaaagaagaaggattgtcggccaaagaagtcgtcaacatcctcaacaagaaatctggtgtgtatgggctcaccaaaggctttagtagtgacatgcgtgacattgaagataatgctattgaaggtgatcctgtatgccgccttgcattcgatgtgtacgaatatcgtatcgcgaaatatattggcgcatacgctgcggccatgaacggtgttgacgcgatcgtctttaccgcaggagttggcgaaaatagcccgattatgcgcgaagaaattattgagaactacttgggctacttagggatcaagatcgataaagaagccaatgacttcaaaggtgaggagaagatcatttcaacgcccgattccaaagtgattgcgatggtagttccgaccaacgaggagctcatgatcgccaaagacacgaaagaaatcattgagaaagggttggacgagcttaagatc

SEQ ID NO: 98 - protein, 417 aa, synthetic construct
  REGION 1..417: note = Variant of acetate kinase
MHHHHHHGGSGMKVLVINSGSSSIKYQLLDMTNEKVLAKGLVERIGIDGSRIVHKVNGEKHVLEHEIKNHEIGLKLVLDLLTDEKYGVLKDLKEIDAVGHRVVHGGERFASSVKITDEVLKTIETLSFLAPLHNPKNIMGIKSSMKLLPGVPQVAVFDTAFHQKMPEKAYLYAIPYEYYEKYKIRRYGFHGTSHRYVSKRAAEIMGKPYDQLKIITVHVGNGASVAAVKNGVSVDTSMGFTPLEGLVMGTRSGDIDPAIVEFLEKEEGLSAKEVVNILNKKSGVYGLTKGFSSDMRDIEDNAIEGDPVCRLAFDVYEYRIAKYIGAYAAAMNGVDAIVFTAGVGENSPIMREEIIENYLGYLGIKIDKEANDFKGEEKIISTPDSKVIAMVVPTNEELMIAKDTKEIIEKGLDELKI

SEQ ID NO: 99 - DNA, 1251 bp, synthetic construct
  misc_feature 1..1251: note = Variant of acetate kinase
  source 1..1251: mol_type = other DNA
atgcaccatcatcatcatcatggcggtagcggcatgaaagttctggtgattaattctggtagctcctccatcaaatatcagctcctcgatatgaccaacgaaaaggtattagcgaaaggcttggtcgagcgcattggcatcgacggttcgcgtatcgtgcataaagttaacggcgaaaaacacgtgctggaacatgagattaagaatcacgaaattggacttaaattggtcctggatcttcttacggacgaaaaatacggtgtgttgaaggatctcaaagaaatcgatgcagttgggcatcgcgtagtacatggcggcgagcgttttgccagtagcgtgaagattactgacgaagtcttaaagaccatcgagacgttgtcgttcttagctccgttacacaatccagcgaacattatgggtatcaagagcagcatgaaattattaccgggtgtgcctcaagttgccgtctttgatacagcgttccaccagaagatgccggagaaagcctatttgtacgcaatcccctatgagtactacgagaaatataaaattcgccgctatgggtttcatggaacctcacatcgtcttgtgagtaaacgtgctgcggaaattatgggcaaaccgtacgatcagctcaagatcattaccgttcacgtgggtaacggcgcatcagttgcggcggtgaagaatggcgtatctgttgacacttccatgggtttcacaccacttgaaggtcttgtcatgggcacgcgcagcggcgatattgatccggccatcgtggaatttcttgagaaagaagaaggattgtcggccaaagaagtcgtcaacatcctcaacaagaaatctggtgtgtatgggctcaccaaaggctttagtagtgacatgcgtgacattgaagataatgctattgaaggtgatcctgtatgccgccttgcattcgatgtgtacgaatatcgtatcgcgaaatatattggcgcatacgctgcggccatgaacggtgttgacgcgatcgtctttaccgcaggagttggcgaaaatagcccgattatgcgcgaagaaattattgagaactacttgggctacttagggatcaagatcgataaagaagccaatgacttcaaaggtgaggagaagatcatttcaacgcccgattccaaagtgattgcgatggtagttccgaccaacgaggagctcatgatcgccaaagacacgaaagaaatcattgagaaagggttggacgagcttaagatc

SEQ ID NO: 100 - protein, 417 aa, synthetic construct
  REGION 1..417: note = Variant of acetate kinase
MHHHHHHGGSGMKVLVINSGSSSIKYQLLDMTNEKVLAKGLVERIGIDGSRIVHKVNGEKHVLEHEIKNHEIGLKLVLDLLTDEKYGVLKDLKEIDAVGHRVVHGGERFASSVKITDEVLKTIETLSFLAPLHNPANIMGIKSSMKLLPGVPQVAVFDTAFHQKMPEKAYLYAIPYEYYEKYKIRRYGFHGTSHRLVSKRAAEIMGKPYDQLKIITVHVGNGASVAAVKNGVSVDTSMGFTPLEGLVMGTRSGDIDPAIVEFLEKEEGLSAKEVVNILNKKSGVYGLTKGFSSDMRDIEDNAIEGDPVCRLAFDVYEYRIAKYIGAYAAAMNGVDAIVFTAGVGENSPIMREEIIENYLGYLGIKIDKEANDFKGEEKIISTPDSKVIAMVVPTNEELMIAKDTKEIIEKGLDELKI

SEQ ID NO: 101 - DNA, 1251 bp, synthetic construct
  misc_feature 1..1251: note = Variant of acetate kinase
  source 1..1251: mol_type = other DNA
atgcaccatcatcatcatcatggcggtagcggcatgaaagttctggtgattaattctggtagctcctccatcaaatatcagctcctcgatatgaccaacgaaaaggtattagcgaaaggcttggtcgagcgcattggcatcgacggttcgcgtatcgtgcataaagttaacggcgaaaaacacgtgctggaacatgagattaagaatcacgaaattggacttgtgttggtcctggatcttcttacggacgaaaaatacggtgtgttgaaggatctcaaagaaatcgatgcagttgggcatcgcgtagtacatggcggcgagcgttttgccagtagcgtgaagattactgacgaagtcttaaagaccatcgagacgttgtcgttcttagctccgttacacaatccagcgaacattatgggtatcaagagcagcatgaaattattaccgggtgtgcctcaagttgccgtctttgatacagcgttccaccagaagatgccggagaaagcctatttgtacgcaatcccctatgagtactacgagaaatataaaattcgccgctatgggtttcatggaacctcacatcgttatgtgagtaaacgtgctgcggaaattatgggcaaaccgtacgatcagctcaagatcattaccgttcacgtgggtaacggcgcatcagttgcggcggtgaagaatggcgtatctgttgacacttccatgggtttcacaccacttgaaggtcttgtcatgggcacgcgcagcggcgatattgatccggccatcgtggaatttcttgagaaagaagaaggattgtcggccaaagaagtcgtcaacatcctcaacaagaaatctggtgtgtatgggctcaccaaaggctttagtagtgacatgcgtgacattgaagataatgctattgaaggtgatcctgtatgccgccttgcattcgatgtgtacgaatatcgtatcgcgaaatatattggcgcatacgctgcggccatgaacggtgttgacgcgatcgtctttaccgcaggagttggcgaaaatagcccgattatgcgcgaagaaattattgagaactacttgggctacttagggatcaagatcgataaagaagccaatgacttcaaaggtgaggagaagatcatttcaacgcccgattccaaagtgattgcgatggtagttccgaccaacgaggagctcatgatcgccaaagacacgaaagaaatcattgagaaagggttggacgagcttaagatc

SEQ ID NO: 102 - protein, 417 aa, synthetic construct
  REGION 1..417: note = Variant of acetate kinase
MHHHHHHGGSGMKVLVINSGSSSIKYQLLDMTNEKVLAKGLVERIGIDGSRIVHKVNGEKHVLEHEIKNHEIGLVLVLDLLTDEKYGVLKDLKEIDAVGHRVVHGGERFASSVKITDEVLKTIETLSFLAPLHNPANIMGIKSSMKLLPGVPQVAVFDTAFHQKMPEKAYLYAIPYEYYEKYKIRRYGFHGTSHRYVSKRAAEIMGKPYDQLKIITVHVGNGASVAAVKNGVSVDTSMGFTPLEGLVMGTRSGDIDPAIVEFLEKEEGLSAKEVVNILNKKSGVYGLTKGFSSDMRDIEDNAIEGDPVCRLAFDVYEYRIAKYIGAYAAAMNGVDAIVFTAGVGENSPIMREEIIENYLGYLGIKIDKEANDFKGEEKIISTPDSKVIAMVVPTNEELMIAKDTKEIIEKGLDELKI

SEQ ID NO: 103 - DNA, 1251 bp, synthetic construct
  misc_feature 1..1251: note = Variant of acetate kinase
  source 1..1251: mol_type = other DNA
atgcaccatcatcatcatcatggcggtagcggcatgaaagttctggtgattaattctggtagctcctccatcaaatatcagctcctcgatatgaccaacgaaaaggtattagcgaaaggcttggtcgagcgcattggcatcgacggttcgcgtatcgtgcataaagttaacggcgaaaaacacgtgctggaacatgagattaagaatcacgaaattggacttaaattggtcctggatcttcttacggacgaaaaatacggtgtgttgaaggatctcaaagaaatcgatgcagttgggcatcgcgtagtacatggcggcgagcgttttgccagtagcgtgaagattactgacgaagtcttaaagaccatcgagacgttgtcgttcttagctccgttacacaatccagcgaacattatgggtatcaagagcagcatgaaattattaccgggtgtgcctcaagttgccgtctttgatacagcgttccaccagaagatgccggagaaagcctatttgtacgcaatcccctatgagtactacgagaaatataaaattcgccgctatgggtttcatggaacctcacatcgttatgtgagtaaacgtgctgcggaaattatgggcaaaccgtacgatcagctcaagatcattaccgttcacgtgggtaacggcgcatcagttgcggcggtgaagaatggcgtatctgttgacacttccatgggtttcacaccacttgaaggtcttgtcatgggcacgcgcagcggcgatattgatccggccatcgtggaatttcttgagaaagaagaaggattgacggccaaagaagtcgtcaacatcctcaacaagaaatctggtgtgtatgggctcaccaaaggctttagtagtgacatgcgtgacattgaagataatgctattgaaggtgatcctgtatgccgccttgcattcgatgtgtacgaatatcgtatcgcgaaatatattggcgcatacgctgcggccatgaacggtgttgacgcgatcgtctttaccgcaggagttggcgaaaatagcccgattatgcgcgaagaaattattgagaactacttgggctacttagggatcaagatcgataaagaagccaatgacttcaaaggtgaggagaagatcatttcaacgcccgattccaaagtgattgcgatggtagttccgaccaacgaggagctcatgatcgccaaagacacgaaagaaatcattgagaaagggttggacgagcttaagatc

SEQ ID NO: 104 - protein, 417 aa, synthetic construct
  REGION 1..417: note = Variant of acetate kinase
MHHHHHHGGSGMKVLVINSGSSSIKYQLLDMTNEKVLAKGLVERIGIDGSRIVHKVNGEKHVLEHEIKNHEIGLKLVLDLLTDEKYGVLKDLKEIDAVGHRVVHGGERFASSVKITDEVLKTIETLSFLAPLHNPANIMGIKSSMKLLPGVPQVAVFDTAFHQKMPEKAYLYAIPYEYYEKYKIRRYGFHGTSHRYVSKRAAEIMGKPYDQLKIITVHVGNGASVAAVKNGVSVDTSMGFTPLEGLVMGTRSGDIDPAIVEFLEKEEGLTAKEVVNILNKKSGVYGLTKGFSSDMRDIEDNAIEGDPVCRLAFDVYEYRIAKYIGAYAAAMNGVDAIVFTAGVGENSPIMREEIIENYLGYLGIKIDKEANDFKGEEKIISTPDSKVIAMVVPTNEELMIAKDTKEIIEKGLDELKI

SEQ ID NO: 105 - DNA, 1251 bp, synthetic construct
  misc_feature 1..1251: note = Variant of acetate kinase
  source 1..1251: mol_type = other DNA
atgcaccatcatcatcatcatggcggtagcggcatgaaagttctggtgattaattctggtagctcctccatcaaatatcagctcctcgatatgaccaacgaaaaggtattagcgaaaggcttggtcgagcgcattggcatcgacggttcgcgtatcgtgcataaagttaacggcgaaaaacacgtgctggaacatgagattaagaatcacgaaattggacttaaattggtcctggatcttcttacggacgaaaaatacggtgtgttgaaggatctcaaagaaatcgatgcagttgggcatcgcgtagtacatggcggcgagcgttttgccagtagcgtgaagattactgacgaagtcttaaagaccatcgagacgttgtcgttcttagctccgttacacaatccagcgaacattatgggttgtaagagcagcatgaaattattaccgggtgtgcctcaagttgccgtctttgatacagcgttccaccagaagatgccggagaaagcctatttgtacgcaatcccctatgagtactacgagaaatataaaattcgccgctatgggtttcatggaacctcacatcgttatgtgagtaaacgtgctgcggaaattatgggcaaaccgtacgatcagctcaagatcattaccgttcacgtgggtaacggcgcatcagttgcggcggtgaagaatggcgtatctgttgacacttccatgggtttcacaccacttgaaggtcttgtcatgggcacgcgcagcggcgatattgatccggccatcgtggaatttcttgagaaagaagaaggattgtcggccaaagaagtcgtcaacatcctcaacaagaaatctggtgtgtatgggctcaccaaaggctttagtagtgacatgcgtgacattgaagataatgctattgaaggtgatcctgtatgccgccttgcattcgatgtgtacgaatatcgtatcgcgaaatatattggcgcatacgctgcggccatgaacggtgttgacgcgatcgtctttaccgcaggagttggcgaaaatagcccgattatgcgcgaagaaattattgagaactacttgggctacttagggatcaagatcgataaagaagccaatgacttcaaaggtgaggagaagatcatttcaacgcccgattccaaagtgattgcgatggtagttccgaccaacgaggagctcatgatcgccaaagacacgaaagaaatcattgagaaagggttggacgagcttaagatc

SEQ ID NO: 106 - protein, 417 aa, synthetic construct
  REGION 1..417: note = Variant of acetate kinase
MHHHHHHGGSGMKVLVINSGSSSIKYQLLDMTNEKVLAKGLVERIGIDGSRIVHKVNGEKHVLEHEIKNHEIGLKLVLDLLTDEKYGVLKDLKEIDAVGHRVVHGGERFASSVKITDEVLKTIETLSFLAPLHNPANIMGCKSSMKLLPGVPQVAVFDTAFHQKMPEKAYLYAIPYEYYEKYKIRRYGFHGTSHRYVSKRAAEIMGKPYDQLKIITVHVGNGASVAAVKNGVSVDTSMGFTPLEGLVMGTRSGDIDPAIVEFLEKEEGLSAKEVVNILNKKSGVYGLTKGFSSDMRDIEDNAIEGDPVCRLAFDVYEYRIAKYIGAYAAAMNGVDAIVFTAGVGENSPIMREEIIENYLGYLGIKIDKEANDFKGEEKIISTPDSKVIAMVVPTNEELMIAKDTKEIIEKGLDELKI

SEQ ID NO: 107 - DNA, 1251 bp, synthetic construct
  misc_feature 1..1251: note = Variant of acetate kinase
  source 1..1251: mol_type = other DNA
atgcaccatcatcatcatcatggcggtagcggcatgaaagttctggtgattaattctggtagctcctccatcaaatatcagctcctcgatatgaccaacgaaaaggtattagcgaaaggcttggtcgagcgcattggcatcgacggttcgcgtatcgtgcataaagttaacggcgaaaaacacgtgctggaacatgagattaagaatcacgaaattggacttaaattggtcctggatcttcttacggacgaaaaatacggtgtgttgaaggatctcaaagaaatcgatgcagttgggcatcgcgtagtacatggcggcgagcgttttgccagtagcgtgaagattactgacgaagtcttaaagaccatcgagacgttgtcgttcttagctccgttacacaatccagcgaacattatgggtatcaagagcagcatgaaattattaccgggtgtgcctcaagttgccgtctttgatacagcgttccaccagaagatgccggagaaagccttgttgtacgcaatcccctatgagtactacgagaaatataaaattcgccgctatgggtttcatggaacctcacatcgttatgtgagtaaacgtgctgcggaaattatgggcaaaccgtacgatcagctcaagatcattaccgttcacgtgggtaacggcgcatcagttgcggcggtgaagaatggcgtatctgttgacacttccatgggtttcacaccacttgaaggtcttgtcatgggcacgcgcagcggcgatattgatccggccatcgtggaatttcttgagaaagaagaaggattgtcggccaaagaagtcgtcaacatcctcaacaagaaatctggtgtgtatgggctcaccaaaggctttagtagtgacatgcgtgacattgaagataatgctattgaaggtgatcctgtatgccgccttgcattcgatgtgtacgaatatcgtatcgcgaaatatattggcgcatacgctgcggccatgaacggtgttgacgcgatcgtctttaccgcaggagttggcgaaaatagcccgattatgcgcgaagaaattattgagaactacttgggctacttagggatcaagatcgataaagaagccaatgacttcaaaggtgaggagaagatcatttcaacgcccgattccaaagtgattgcgatggtagttccgaccaacgaggagctcatgatcgccaaagacacgaaagaaatcattgagaaagggttggacgagcttaagatc

SEQ ID NO: 108 - protein, 417 aa, synthetic construct
  REGION 1..417: note = Variant of acetate kinase
MHHHHHHGGSGMKVLVINSGSSSIKYQLLDMTNEKVLAKGLVERIGIDGSRIVHKVNGEKHVLEHEIKNHEIGLKLVLDLLTDEKYGVLKDLKEIDAVGHRVVHGGERFASSVKITDEVLKTIETLSFLAPLHNPANIMGIKSSMKLLPGVPQVAVFDTAFHQKMPEKALLYAIPYEYYEKYKIRRYGFHGTSHRYVSKRAAEIMGKPYDQLKIITVHVGNGASVAAVKNGVSVDTSMGFTPLEGLVMGTRSGDIDPAIVEFLEKEEGLSAKEVVNILNKKSGVYGLTKGFSSDMRDIEDNAIEGDPVCRLAFDVYEYRIAKYIGAYAAAMNGVDAIVFTAGVGENSPIMREEIIENYLGYLGIKIDKEANDFKGEEKIISTPDSKVIAMVVPTNEELMIAKDTKEIIEKGLDELKI

SEQ ID NO: 109 - DNA, 1251 bp, synthetic construct
  misc_feature 1..1251: note = Variant of acetate kinase
  source 1..1251: mol_type = other DNA
atgcaccatcatcatcatcatggcggtagcggcatgaaagttctggtgattaattctggtagctcctccatcaaatatcagctcctcgatatgaccaacgaaaaggtattagcgaaaggcttggtcgagcgcattggcatcgacggttcgcgtatcgtgcataaagttaacggcgaaaaacacgtgctggaacatgagattaagaatcacgaaattggacttaaattggtcctggatcttcttacggacgaaaaatacggtgtgttgaaggatctcaaagaaatcgatgcagttgggcatcgcgtagtacatggcggcgagcgttttgccagtagcgtgaagattactgacgaagtcttaaagaccatcgagacgttgtcgttcttagctccgttacacaatccagcgaacattatgggtatcaagagcagcatgaaatatttaccgggtgtgcctcaagttgccgtctttgatacagcgttccaccagaagatgccggagaaagcctatttgtacgcaatcccctatgagtactacgagaaatataaaattcgccgctatgggtttcatggaacctcacatcgttatgtgagtaaacgtgctgcggaaattatgggcaaaccgtacgatcagctcaagatcattaccgttcacgtgggtaacggcgcatcagttgcggcggtgaagaatggcgtatctgttgacacttccatgggtttcacaccacttgaaggtcttgtcatgggcacgcgcagcggcgatattgatccggccatcgtggaatttcttgagaaagaagaaggattgtcggccaaagaagtcgtcaacatcctcaacaagaaatctggtgtgtatgggctcaccaaaggctttagtagtgacatgcgtgacattgaagataatgctattgaaggtgatcctgtatgccgccttgcattcgatgtgtacgaatatcgtatcgcgaaatatattggcgcatacgctgcggccatgaacggtgttgacgcgatcgtctttaccgcaggagttggcgaaaatagcccgattatgcgcgaagaaattattgagaactacttgggctacttagggatcaagatcgataaagaagccaatgacttcaaaggtgaggagaagatcatttcaacgcccgattccaaagtgattgcgatggtagttccgaccaacgaggagctcatgatcgccaaagacacgaaagaaatcattgagaaagggttggacgagcttaagatc

SEQ ID NO: 110 - protein, 417 aa, synthetic construct
  REGION 1..417: note = Variant of acetate kinase
MHHHHHHGGSGMKVLVINSGSSSIKYQLLDMTNEKVLAKGLVERIGIDGSRIVHKVNGEKHVLEHEIKNHEIGLKLVLDLLTDEKYGVLKDLKEIDAVGHRVVHGGERFASSVKITDEVLKTIETLSFLAPLHNPANIMGIKSSMKYLPGVPQVAVFDTAFHQKMPEKAYLYAIPYEYYEKYKIRRYGFHGTSHRYVSKRAAEIMGKPYDQLKIITVHVGNGASVAAVKNGVSVDTSMGFTPLEGLVMGTRSGDIDPAIVEFLEKEEGLSAKEVVNILNKKSGVYGLTKGFSSDMRDIEDNAIEGDPVCRLAFDVYEYRIAKYIGAYAAAMNGVDAIVFTAGVGENSPIMREEIIENYLGYLGIKIDKEANDFKGEEKIISTPDSKVIAMVVPTNEELMIAKDTKEIIEKGLDELKI

SEQ ID NO: 111 - DNA, 1251 bp, synthetic construct
  misc_feature 1..1251: note = Variant of acetate kinase
  source 1..1251: mol_type = other DNA
atgcaccatcatcatcatcatggcggtagcggcatgaaagttctggtgattaattctggtagctcctccatcaaatatcagctcctcgatatgaccaacgaaaaggtattagcgaaaggcttggtcgagcgcattggcatcgacggttcgcgtatcgtgcataaagttaacggcgaaaaacacgtgctggaacatgagattaagaatcacgaaattggacttaaattggtcctggatcttcttacggacgaaaaatacggtgtgttgaaggatctcaaagaaatcgatgcagttgggcatcgcgtagtacatggcggcgagcgttttgccagtagcgtgaagattactgacgaagtcttaaagaccatcgagacgttgtcgttcttagctccgttacacaatccagcgaacattatgggtatctggagcagcatgaaattattaccgggtgtgcctcaagttgccgtctttgatacagcgttccaccagaagatgccggagaaagcctatttgtacgcaatcccctatgagtactacgagaaatataaaattcgccgctatgggtttcatggaacctcacatcgttatgtgagtaaacgtgctgcggaaattatgggcaaaccgtacgatcagctcaagatcattaccgttcacgtgggtaacggcgcatcagttgcggcggtgaagaatggcgtatctgttgacacttccatgggtttcacaccacttgaaggtcttgtcatgggcacgcgcagcggcgatattgatccggccatcgtggaatttcttgagaaagaagaaggattgtcggccaaagaagtcgtcaacatcctcaacaagaaatctggtgtgtatgggctcaccaaaggctttagtagtgacatgcgtgacattgaagataatgctattgaaggtgatcctgtatgccgccttgcattcgatgtgtacgaatatcgtatcgcgaaatatattggcgcatacgctgcggccatgaacggtgttgacgcgatcgtctttaccgcaggagttggcgaaaatagcccgattatgcgcgaagaaattattgagaactacttgggctacttagggatcaagatcgataaagaagccaatgacttcaaaggtgaggagaagatcatttcaacgcccgattccaaagtgattgcgatggtagttccgaccaacgaggagctcatgatcgccaaagacacgaaagaaatcattgagaaagggttggacgagcttaagatc

SEQ ID NO: 112 - protein, 417 aa, synthetic construct
  REGION 1..417: note = Variant of acetate kinase
MHHHHHHGGSGMKVLVINSGSSSIKYQLLDMTNEKVLAKGLVERIGIDGSRIVHKVNGEKHVLEHEIKNHEIGLKLVLDLLTDEKYGVLKDLKEIDAVGHRVVHGGERFASSVKITDEVLKTIETLSFLAPLHNPANIMGIWSSMKLLPGVPQVAVFDTAFHQKMPEKAYLYAIPYEYYEKYKIRRYGFHGTSHRYVSKRAAEIMGKPYDQLKIITVHVGNGASVAAVKNGVSVDTSMGFTPLEGLVMGTRSGDIDPAIVEFLEKEEGLSAKEVVNILNKKSGVYGLTKGFSSDMRDIEDNAIEGDPVCRLAFDVYEYRIAKYIGAYAAAMNGVDAIVFTAGVGENSPIMREEIIENYLGYLGIKIDKEANDFKGEEKIISTPDSKVIAMVVPTNEELMIAKDTKEIIEKGLDELKI

SEQ ID NO: 113 - DNA, 1251 bp, synthetic construct
  misc_feature 1..1251: note = Variant of acetate kinase
  source 1..1251: mol_type = other DNA
atgcaccatcatcatcatcatggcggtagcggcatgaaagttctggtgattaattctggtagctcctccatcaaatatcagctcctcgatatgaccaacgaaaaggtattagcgaaaggcttggtcgagcgcattggcatcgacggttcgcgtatcgtgcataaagttaacggcgaaaaacacgtgctggaacatgagattaagaatcacgaaattggacttaaattggtcctggatcttcttacggacgaaaaatacggtgtgttgaaggatctcaaagaaatcgatgcagttgggcatcgcgtagtacatggcggcgagcgttttgccagtagcgtgaagattactgacgaagtcttaaagaccatcgagacgttgtcgttcttagctccgttacacaatccagcgaacattatgggtatcaagagcagcatgaaaatgttaccgggtgtgcctcaagttgccgtctttgatacagcgttccaccagaagatgccggagaaagcctatttgtacgcaatcccctatgagtactacgagaaatataaaattcgccgctatgggtttcatggaacctcacatcgttatgtgagtaaacgtgctgcggaaattatgggcaaaccgtacgatcagctcaagatcattaccgttcacgtgggtaacggcgcatcagttgcggcggtgaagaatggcgtatctgttgacacttccatgggtttcacaccacttgaaggtcttgtcatgggcacgcgcagcggcgatattgatccggccatcgtggaatttcttgagaaagaagaaggattgtcggccaaagaagtcgtcaacatcctcaacaagaaatctggtgtgtatgggctcaccaaaggctttagtagtgacatgcgtgacattgaagataatgctattgaaggtgatcctgtatgccgccttgcattcgatgtgtacgaatatcgtatcgcgaaatatattggcgcatacgctgcggccatgaacggtgttgacgcgatcgtctttaccgcaggagttggcgaaaatagcccgattatgcgcgaagaaattattgagaactacttgggctacttagggatcaagatcgataaagaagccaatgacttcaaaggtgaggagaagatcatttcaacgcccgattccaaagtgattgcgatggtagttccgaccaacgaggagctcatgatcgccaaagacacgaaagaaatcattgagaaagggttggacgagcttaagatc

SEQ ID NO: 114 - protein, 417 aa, synthetic construct
  REGION 1..417: note = Variant of acetate kinase
MHHHHHHGGSGMKVLVINSGSSSIKYQLLDMTNEKVLAKGLVERIGIDGSRIVHKVNGEKHVLEHEIKNHEIGLKLVLDLLTDEKYGVLKDLKEIDAVGHRVVHGGERFASSVKITDEVLKTIETLSFLAPLHNPANIMGIKSSMKMLPGVPQVAVFDTAFHQKMPEKAYLYAIPYEYYEKYKIRRYGFHGTSHRYVSKRAAEIMGKPYDQLKIITVHVGNGASVAAVKNGVSVDTSMGFTPLEGLVMGTRSGDIDPAIVEFLEKEEGLSAKEVVNILNKKSGVYGLTKGFSSDMRDIEDNAIEGDPVCRLAFDVYEYRIAKYIGAYAAAMNGVDAIVFTAGVGENSPIMREEIIENYLGYLGIKIDKEANDFKGEEKIISTPDSKVIAMVVPTNEELMIAKDTKEIIEKGLDELKI

SEQ ID NO: 115 - DNA, 1251 bp, synthetic construct
  misc_feature 1..1251: note = Variant of acetate kinase
  source 1..1251: mol_type = other DNA
atgcaccatcatcatcatcatggcggtagcggcatgaaagttctggtgattaattctggtagctcctccatcaaatatcagctcctcgatatgaccaacgaaaaggtattagcgaaaggcatggtcgagcgcattggcatcgacggttcgcgtatcgtgcataaagttaacggcgaaaaacacgtgctggaacatgagattaagaatcacgaaattggacttaaattggtcctggatcttcttacggacgaaaaatacggtgtgttgaaggatctcaaagaaatcgatgtagttgggcatcgcgtagtacatggcggcgagcgttttgccagtagcgtgaagattactgacgaagtcttaaagaccatcgagacgttgtcgttcttagctccgttacacaatccagcgaacattatgggtatcaagagcagcatgaaattattaccgggtgtgcctcaagttgccgtctttgatacagcgttccaccagaagatgccggagaaagcctatttgtacgcaatcccctatgagtactacgagaaatataaaattcgccgctatgggtttcatggaacctcacatcgttatgtgagtaaacgtgctgcggaaattatgggcaaaccgtacgatcagctcaagatcattaccgttcacgtgggtaacggcgcatcagttgcggcggtgaagaatggcgtatctgttgacacttccatgggtttcacaccacttgaaggtcttgtcatgggcacgcgcagcggcgatattgatccggccatcgtggaatttcttgagaaagaagaaggattgtcggccaaagaagtcgtcaacatcctcaacaagaaatctggtgtgtatgggctcaccaaaggctttagtagtgacatgcgtgacattgaagataatgctattgaaggtgatcctgtatgccgccttgcattcgatgtgtacgaatatcgtatcgcgaaatatattggcgcatacgctgcggccatgaacggtgttgacgcgatcgtctttaccgcaggagttggcgaaaatagcccgattatgcgcgaagaaattattgagaactacttgggctacttagggatcaagatcgataaagaagccaatgacttcaaaggtgaggagaagatcatttcaacgcccgattccaaagtgattgcgatggtagttccgaccaacgaggagctcatgatcgccaaagacacgaaagaaatcattgagaaagggttggacgagcttaagatc

SEQ ID NO: 116 - protein, 417 aa, synthetic construct
  REGION 1..417: note = Variant of acetate kinase
MHHHHHHGGSGMKVLVINSGSSSIKYQLLDMTNEKVLAKGMVERIGIDGSRIVHKVNGEKHVLEHEIKNHEIGLKLVLDLLTDEKYGVLKDLKEIDVVGHRVVHGGERFASSVKITDEVLKTIETLSFLAPLHNPANIMGIKSSMKLLPGVPQVAVFDTAFHQKMPEKAYLYAIPYEYYEKYKIRRYGFHGTSHRYVSKRAAEIMGKPYDQLKIITVHVGNGASVAAVKNGVSVDTSMGFTPLEGLVMGTRSGDIDPAIVEFLEKEEGLSAKEVVNILNKKSGVYGLTKGFSSDMRDIEDNAIEGDPVCRLAFDVYEYRIAKYIGAYAAAMNGVDAIVFTAGVGENSPIMREEIIENYLGYLGIKIDKEANDFKGEEKIISTPDSKVIAMVVPTNEELMIAKDTKEIIEKGLDELKI

SEQ ID NO: 117 - DNA, 1251 bp, synthetic construct
  misc_feature 1..1251: note = Variant of acetate kinase
  source 1..1251: mol_type = other DNA
atgcaccatcatcatcatcatggcggtagcggcatgaaagttctggtgattaattctggtagctcctccatcaaatatcagctcctcgatatgaccaacgaaaaggtattagcgaaaggcttggtcgagcgcattggcatcgacggttcgcgtatcgtgcataaagttaacggcgaaaaacacgtgctggaacatgagattaagaatcacgaaattggacttaaattggtcctggatcttcttacggacgaaaaatacggtgtgttgaaggatctcaaagaaatcgatgcagttgggcatcgcgtagtacatggcggcgagcgttttgccagtagcgtgaagattactgacgaagtcttaaagaccatcgagacgttgtcgttcttagctccgttacacaatccagcgaacattatgggtatcaagagcagcatgaaattattaccgggtgtgcctcaagttgccgtctttgatacagcgttccaccagaagatgccggagaaagcctatttgtacgcaatcccctatgagtactacgagaaatataaaattcgccgctatgggtttcatggaacctcacatcgttatgtgagtaaacgtgctgcggaaattatgggcaaaccgtacgatcagctcaagatcattaccgttcacgtgggtaacggcgcatcagttgcggcggtgaagaatggcgtatctgttgacacttccatgggtttcacaccacttgaaggtcttgtcatgggcacgcgcagcggcgatattgatccggccatcgtggaatttcttgagaaagaagaaggattgtcggccaaagaagtcgtcaacatcctcaacaagaaatctggtgtgtatgggctcaccaaaggctttagtagtgacatgcgtgacattgaagataatgctattgaaggtgatcctgtatgccgccttgcattcgatgtgtacgaatatcgtatcgcgaaatatattggcgcatacgctgcggccatgaacggtgttgacgcgatcgtctttaccgcaggagttggcgaaaatagcccgattatgcgcgaagaaattattgagaactacttgggctacttagggatcaagatcgataaaaatgccaatgacttcaaaggtgaggagaagatcatttcaacgcccgattccaaagtgattgcgatggtagttccgaccaacgaggagctcatgatcgccaaagacacgaaagaaatcattgagaaagggttggacgagcttaagatc

SEQ ID NO: 118 - protein, 417 aa, synthetic construct
  REGION 1..417: note = Variant of acetate kinase
MHHHHHHGGSGMKVLVINSGSSSIKYQLLDMTNEKVLAKGLVERIGIDGSRIVHKVNGEKHVLEHEIKNHEIGLKLVLDLLTDEKYGVLKDLKEIDAVGHRVVHGGERFASSVKITDEVLKTIETLSFLAPLHNPANIMGIKSSMKLLPGVPQVAVFDTAFHQKMPEKAYLYAIPYEYYEKYKIRRYGFHGTSHRYVSKRAAEIMGKPYDQLKIITVHVGNGASVAAVKNGVSVDTSMGFTPLEGLVMGTRSGDIDPAIVEFLEKEEGLSAKEVVNILNKKSGVYGLTKGFSSDMRDIEDNAIEGDPVCRLAFDVYEYRIAKYIGAYAAAMNGVDAIVFTAGVGENSPIMREEIIENYLGYLGIKIDKNANDFKGEEKIISTPDSKVIAMVVPTNEELMIAKDTKEIIEKGLDELKI

SEQ ID NO: 119 - DNA, 1251 bp, synthetic construct
  misc_feature 1..1251: note = Variant of acetate kinase
  source 1..1251: mol_type = other DNA
atgcaccatcatcatcatcatggcggtagcggcatgaaagttctggtgattaattctggtagctcctccatcaaatatcagctcctcgatatgaccaacgaaaaggtattagcgaaaggcttggtcgagcgcattggcatcgacggttcgcgtatcgtgcataaagttaacggcgaaaaacacgtgctggaacatgagattaagaatcacgaaattggaattaaattggtcctggatcttcttacggacgaaaaatacggtgtgttgaaggatctcaaagaaatcgatgcagttgggcatcgcgtagtacatggcggcgagcgttttgccagtagcgtgaagattactgacgaagtcttaaagaccatcgagacgttgtcgttcttagctccgttacacaatccagcgaacattatgggtatcaagagcagcatgaaattattaccgggtgtgcctcaagttgccgtctttgatacagcgttccaccagaagatgccggagaaagcctatttgtacgcaatcccctatgagtactacgagaaatataaaattcgccgctatgggtttcatggaacctcacatcgttatgtgagtaaacgtgctgcggaaattatgggcaaaccgtacgatcagctcaagatcattaccgttcacgtgggtaacggcgcatcagttgcggcggtgaagaatggcgtatctgttgacacttccatgggtttcacaccacttgaaggtcttgtcatgggcacgcgcagcggcgatattgatccggccatcgtggaatttcttgagaaagaagaaggattgtcggccaaagaagtcgtcaacatcctcaacaagaaatctggtgtgtatgggctcaccaaaggctttagtagtgacatgcgtgacattgaagataatgctattgaaggtgatcctgtatgccgccttgcattcgatgtgtacgaatatcgtatcgcgaaatatattggcgcatacgctgcggccatgaacggtgttgacgcgatcgtctttaccgcaggagttggcgaaaatagcccgattatgcgcgaagaaattattgagaactacttgggctacttagggatcaagatcgataaagaagccaatgacttcaaaggtgaggagaagatcatttcaacgcccgattccaaagtgattgcgatggtagttccgaccaacgaggagctcatgatcgccaaagacacgaaagaaatcattgagaaagggttggacgagcttaagatc

SEQ ID NO: 120 - protein, 417 aa, synthetic construct
  REGION 1..417: note = Variant of acetate kinase
MHHHHHHGGSGMKVLVINSGSSSIKYQLLDMTNEKVLAKGLVERIGIDGSRIVHKVNGEKHVLEHEIKNHEIGIKLVLDLLTDEKYGVLKDLKEIDAVGHRVVHGGERFASSVKITDEVLKTIETLSFLAPLHNPANIMGIKSSMKLLPGVPQVAVFDTAFHQKMPEKAYLYAIPYEYYEKYKIRRYGFHGTSHRYVSKRAAEIMGKPYDQLKIITVHVGNGASVAAVKNGVSVDTSMGFTPLEGLVMGTRSGDIDPAIVEFLEKEEGLSAKEVVNILNKKSGVYGLTKGFSSDMRDIEDNAIEGDPVCRLAFDVYEYRIAKYIGAYAAAMNGVDAIVFTAGVGENSPIMREEIIENYLGYLGIKIDKEANDFKGEEKIISTPDSKVIAMVVPTNEELMIAKDTKEIIEKGLDELKI

SEQ ID NO: 121 - DNA, 1251 bp, synthetic construct
  misc_feature 1..1251: note = Variant of acetate kinase
  source 1..1251: mol_type = other DNA
atgcaccatcatcatcatcatggcggtagcggcatgaaagttctggtgattaattctggtagctcctccatcaaatatcagctcctcgatatgaccaacgaaaaggtattagcgaaaggcttggtcgagcgcattggcatcgacggttcgcgtctggtgcataaagttaacggcgaaaaacacgtgctggaacatgagattaagaatcacgaaattggacttaaattggtcctggatcttcttacggacgaaaaatacggtgtgttgaaggatctcaaagaaatcgatgcagttgggcatcgcgtagtacatggcggcgagcgttttgccagtagcgtgaagattactgacgaagtcttaaagaccatcgagacgttgtcgttcttagctccgttacacaatccagcgaacattatgggtatcaagagcagcatgaaattattaccgggtgtgcctcaagttgccgtctttgatacagcgttccaccagaagatgccggagaaagcctatttgtacgcaatcccctatgagtactacgagaaatataaaattcgccgctatgggtttcatggaacctcacatcgttatgtgagtaaacgtgctgcggaaattatgggcaaaccgtacgatcagctcaagatcattaccgttcacgtgggtaacggcgcatcagttgcggcggtgaagaatggcgtatctgttgacacttccatgggtttcacaccacttgaaggtcttgtcatgggcacgcgcagcggcgatattgatccggccatcgtggaatttcttgagaaagaagaaggattgtcggccaaagaagtcgtcaacatcctcaacaagaaatctggtgtgtatgggctcaccaaaggctttagtagtgacatgcgtgacattgaagataatgctattgaaggtgatcctgtatgccgccttgcattcgatgtgtacgaatatcgtatcgcgaaatatattggcgcatacgctgcggccatgaacggtgttgacgcgatcgtctttaccgcaggagttggcgaaaatagcccgattatgcgcgaagaaattattgagaactacttgggctacttagggatcaagatcgataaagaagccaatgacttcaaaggtgaggagaagatcatttcaacgcccgattccaaagtgattgcgatggtagttccgaccaacgaggagctcatgatcgccaaagacacgaaagaaatcattgagaaagggttggacgagcttaagatc

SEQ ID NO: 122 - protein, 417 aa, synthetic construct
  REGION 1..417: note = Variant of acetate kinase
MHHHHHHGGSGMKVLVINSGSSSIKYQLLDMTNEKVLAKGLVERIGIDGSRLVHKVNGEKHVLEHEIKNHEIGLKLVLDLLTDEKYGVLKDLKEIDAVGHRVVHGGERFASSVKITDEVLKTIETLSFLAPLHNPANIMGIKSSMKLLPGVPQVAVFDTAFHQKMPEKAYLYAIPYEYYEKYKIRRYGFHGTSHRYVSKRAAEIMGKPYDQLKIITVHVGNGASVAAVKNGVSVDTSMGFTPLEGLVMGTRSGDIDPAIVEFLEKEEGLSAKEVVNILNKKSGVYGLTKGFSSDMRDIEDNAIEGDPVCRLAFDVYEYRIAKYIGAYAAAMNGVDAIVFTAGVGENSPIMREEIIENYLGYLGIKIDKEANDFKGEEKIISTPDSKVIAMVVPTNEELMIAKDTKEIIEKGLDELKI

SEQ ID NO: 123 - DNA, 1251 bp, synthetic construct
  misc_feature 1..1251: note = Variant of acetate kinase
  source 1..1251: mol_type = other DNA
atgcaccatcatcatcatcatggcggtagcggcatgaaagttctggtgattaattctggtagctcctccatcaaatatcagctcctcgatatgaccaacgaaaaggtattagcgaaaggcttggtcgagcgcattggcatcgacggttcgcgtatcgtgcataaagttaacggcgaaaaacacgtgctggaacatgagattaagaatcacgaaattggacttaaattggtcctggatcttcttacggacgaaaaatacggtgtgttgaaggatctcaaagaaatcgatgcagttgggcatcgcgtagtacatggcggcgagcgttttgccagtagcgtgaagattactgacgaagtcttaaagaccatcgagacgttgtcgttcttagctccgttacacaatccagcgaacattatgggtatcaagagcagcatgaaattattaccgggtgtgcctcaagttgccgtctttgatacagcgttccaccagaagatgccggagaaagcctatttgtacgcaatcccctatgagtactacgagaaatataaaattcgccgctatgggtttcatggaacctcacatcgttatgtgagtaaacgtgctgcggaaattatgggcaaaccgtacgatcagctcaagatcattaccgttcacgtgggtaacggcgcatcagttgcggcggtgaagaatggcgtatctgttgacacttccatgggtttcacaccacttgaaggtcttgtcatgggcacgcgcagcggcgatattgatccggccatcgtggaatttcttgagaaagaagaaggattgtcggccaaagaagtcgtcaacatcctcaacaagaaatctggtgtgtatgggctcaccaaaggctttagtagtgacatgcgtgacattgaagataatgctattgaaggtgatcctgtatgccgccttgcattcgatgtgtacgaatatcgtatcgcgaaatatattggcgcatacgctgcggccatgaacggtgttgacgcgatcgtctttaccgcaggagttggcgaaaatagcccgattatgcgctcggaaattattgagaactacttgggctacttagggatcaagatcgataaagaagccaatgacttcaaaggtgaggagaagatcatttcaacgcccgattccaaagtgattgcgatggtagttccgaccaacgaggagctcatgatcgccaaagacacgaaagaaatcattgagaaagggttggacgagcttaagatc

SEQ ID NO: 124 - protein, 417 aa, synthetic construct
  REGION 1..417: note = Variant of acetate kinase
MHHHHHHGGSGMKVLVINSGSSSIKYQLLDMTNEKVLAKGLVERIGIDGSRIVHKVNGEKHVLEHEIKNHEIGLKLVLDLLTDEKYGVLKDLKEIDAVGHRVVHGGERFASSVKITDEVLKTIETLSFLAPLHNPANIMGIKSSMKLLPGVPQVAVFDTAFHQKMPEKAYLYAIPYEYYEKYKIRRYGFHGTSHRYVSKRAAEIMGKPYDQLKIITVHVGNGASVAAVKNGVSVDTSMGFTPLEGLVMGTRSGDIDPAIVEFLEKEEGLSAKEVVNILNKKSGVYGLTKGFSSDMRDIEDNAIEGDPVCRLAFDVYEYRIAKYIGAYAAAMNGVDAIVFTAGVGENSPIMRSEIIENYLGYLGIKIDKEANDFKGEEKIISTPDSKVIAMVVPTNEELMIAKDTKEIIEKGLDELKI

SEQ ID NO: 125 - DNA, 1251 bp, synthetic construct
  misc_feature 1..1251: note = Variant of acetate kinase
  source 1..1251: mol_type = other DNA
atgcaccatcatcatcatcatggcggtagcggcatgaaagttctggtgattaattctggtagctcctccatcaaatatcagctcctcgatatgaccaacgaaaaggtattagcgaaaggcttggtcgagcgcattggcatcgacggttcgcgtatcgtgcataaagttaacggcgaaaaacacgtgctggaacatgagattaagaatcacgaaattggacttaaattggtcctggatcttcttacggacgaaaaatacggtgtgttgaaggatctcaaagaaatcgatgcagttgggcatcgcgtagtacatggcggcgagcgttttgccagtagcgtgaagattactgacgaagtcttaaagaccatcgagacgttgtcgttcttagctccgttacacaatccagcgaacattatgggtatcaagagcagcatgaaattattaccgggtgtgcctcaagttgccgtctttgatacagcgttccaccagaagatgccggagaaagcctatttgtacgcaatcccctatgagtactacgagaaatataaaattcgccgctatgggtttcatggaacctcacatcgttatgtgagtaaacgtgctgcggaaattatgggcaaaccgtacgatcagctcaagatcattaccgttcacgtgggtaacggcgcatcagttgcggcggtgaagaatggcgtatctgttgacacttccatgggtttcacaccacttgaaggtcttgtcatgggcacgcgcagcggcgatattgatccggccatcgtggaatttcttgagaaagaagaaggattgtcggccaaagaagtcgtcaacatcctcaacaagaaatctggtgtgtatgggctcaccaaaggctttagtagtgacatgcgtgacattgaagataatgctattgaaggtgatcctgtatgccgccttgcattcgatgtgtacgaatatcgtatcgcgaaatatattggcgcatacgctgcggccatgaacggtgttgacgcgatcgtctttaccgcaggagttggcgaaaatagcccgattatgcgcgaagaaattattgagaactacttgggctacttagggatcaagatcgataaagaagccaatgacgtgaaaggtgaggagaagatcatttcaacgcccgattccaaagtgattgcgatggtagttccgaccaacgaggagctcatgatcgccaaagacacgaaagaaatcattgagaaagggttggacgagcttaagatc

SEQ ID NO: 126 - protein, 417 aa, synthetic construct
  REGION 1..417: note = Variant of acetate kinase
MHHHHHHGGSGMKVLVINSGSSSIKYQLLDMTNEKVLAKGLVERIGIDGSRIVHKVNGEKHVLEHEIKNHEIGLKLVLDLLTDEKYGVLKDLKEIDAVGHRVVHGGERFASSVKITDEVLKTIETLSFLAPLHNPANIMGIKSSMKLLPGVPQVAVFDTAFHQKMPEKAYLYAIPYEYYEKYKIRRYGFHGTSHRYVSKRAAEIMGKPYDQLKIITVHVGNGASVAAVKNGVSVDTSMGFTPLEGLVMGTRSGDIDPAIVEFLEKEEGLSAKEVVNILNKKSGVYGLTKGFSSDMRDIEDNAIEGDPVCRLAFDVYEYRIAKYIGAYAAAMNGVDAIVFTAGVGENSPIMREEIIENYLGYLGIKIDKEANDVKGEEKIISTPDSKVIAMVVPTNEELMIAKDTKEIIEKGLDELKI

SEQ ID NO: 127 - DNA, 1251 bp, synthetic construct
  misc_feature 1..1251: note = Variant of acetate kinase
  source 1..1251: mol_type = other DNA
atgcaccatcatcatcatcatggcggtagcggcatgaaagttctggtgattaattctggtagctcctccatcaaatatctgctcctcgatatgaccaacgaaaaggtattagcgaaaggcttggtcgagcgcattggcatcgacggttcgcgtatcgtgcataaagttaacggcgaaaaacacgtgctggaacatgagattaagaatcacgaaattggacttaaattggtcctggatcttcttacggacgaaaaatacggtgtgttgaaggatctcaaagaaatcgatgcagttgggcatcgcgtagtacatggcggcgagcgttttgccagtagcgtgaagattactgacgaagtcttaaagaccatcgagacgttgtcgttcttagctccgttacacaatccagcgaacattatgggtatcaagagcagcatgaaattattaccgggtgtgcctcaagttgccgtctttgatacagcgttccaccagaagatgccggagaaagcctatttgtacgcaatcccctatgagtactacgagaaatataaaattcgccgctatgggtttcatggaacctcacatcgttatgtgagtaaacgtgctgcggaaattatgggcaaaccgtacgatcagctcaagatcattaccgttcacgtgggtaacggcgcatcagttgcggcggtgaagaatggcgtatctgttgacacttccatgggtttcacaccacttgaaggtcttgtcatgggcacgcgcagcggcgatattgatccggccatcgtggaatttcttgagaaagaagaaggattgtcggccaaagaagtcgtcaacatcctcaacaagaaatctggtgtgtatgggctcaccaaaggctttagtagtgacatgcgtgacattgaagataatgctattgaaggtgatcctgtatgccgccttgcattcgatgtgtacgaatatcgtatcgcgaaatatattggcgcatacgctgcggccatgaacggtgttgacgcgatcgtctttaccgcaggagttggcgaaaatagcccgattatgcgcgaagaaattattgagaactacttgggctacttagggatcaagatcgataaagaagccaatgacttcaaaggtgaggagaagatcatttcaacgcccgattccaaagtgattgcgatggtagttccgaccaacgaggagctcatgatcgccaaagacacgaaagaaatcattgagaaagggttggacgagcttaagatc

SEQ ID NO: 128 - protein, 417 aa, synthetic construct
  REGION 1..417: note = Variant of acetate kinase
MHHHHHHGGSGMKVLVINSGSSSIKYLLLDMTNEKVLAKGLVERIGIDGSRIVHKVNGEKHVLEHEIKNHEIGLKLVLDLLTDEKYGVLKDLKEIDAVGHRVVHGGERFASSVKITDEVLKTIETLSFLAPLHNPANIMGIKSSMKLLPGVPQVAVFDTAFHQKMPEKAYLYAIPYEYYEKYKIRRYGFHGTSHRYVSKRAAEIMGKPYDQLKIITVHVGNGASVAAVKNGVSVDTSMGFTPLEGLVMGTRSGDIDPAIVEFLEKEEGLSAKEVVNILNKKSGVYGLTKGFSSDMRDIEDNAIEGDPVCRLAFDVYEYRIAKYIGAYAAAMNGVDAIVFTAGVGENSPIMREEIIENYLGYLGIKIDKEANDFKGEEKIISTPDSKVIAMVVPTNEELMIAKDTKEIIEKGLDELKI

SEQ ID NO: 129 - DNA, 1251 bp, synthetic construct
  misc_feature 1..1251: note = Variant of acetate kinase
  source 1..1251: mol_type = other DNA
atgcaccatcatcatcatcatggcggtagcggcatgaaagttctggtgattaattctggtagctcctccatcaaatatcagctcctcgatatgaccaacgaaaaggtattagcgaaaggcttggtcgagcgcattggcatcgacggttcgcgtatcgtgcataaagttaacggcgaaaaacacgtgctggaacatgagattaagaatcacgaaattggacttaaattggtcctggatcttcttacggacgaaaaatacggtgtgttgaaggatctcaaagaaatcgatgcagttgggcatcgcgtagtacatggcggcgagcgttttgccagtagcgtgaagactactgacgaagtcttaaagaccatcgagacgttgtcgttcttagctccgttacacaatccagcgaacattatgggtatcaagagcagcatgaaattattaccgggtgtgcctcaagttgccgtctttgatacagcgttccaccagaagatgccggagaaagcctatttgtacgcaatcccctatgagtactacgagaaatataaaattcgccgctatgggtttcatggaacctcacatcgttatgtgagtaaacgtgctgcggaaattatgggcaaaccgtacgatcagctcaagatcattaccgttcacgtgggtaacggcgcatcagttgcggcggtgaagaatggcgtatctgttgacacttccatgggtttcacaccacttgaaggtcttgtcatgggcacgcgcagcggcgatattgatccggccatcgtggaatttcttgagaaagaagaaggattgtcggccaaagaagtcgtcaacatcctcaacaagaaatctggtgtgtatgggctcaccaaaggctttagtagtgacatgcgtgacattgaagataatgctattgaaggtgatcctgtatgccgccttgcattcgatgtgtacgaatatcgtatcgcgaaatatattggcgcatacgctgcggccatgaacggtgttgacgcgatcgtctttaccgcaggagttggcgaaaatagcccgattatgcgcgaagaaattattgagaactacttgggctacttagggatcaagatcgataaagaagccaatgacttcaaaggtgaggagaagatcatttcaacgcccgattccaaagtgattgcgatggtagttccgaccaacgaggagctcatgatcgccaaagacacgaaagaaatcattgagaaagggttggacgagcttaagatc

SEQ ID NO: 130 - protein, 417 aa, synthetic construct
  REGION 1..417: note = Variant of acetate kinase
MHHHHHHGGSGMKVLVINSGSSSIKYQLLDMTNEKVLAKGLVERIGIDGSRIVHKVNGEKHVLEHEIKNHEIGLKLVLDLLTDEKYGVLKDLKEIDAVGHRVVHGGERFASSVKTTDEVLKTIETLSFLAPLHNPANIMGIKSSMKLLPGVPQVAVFDTAFHQKMPEKAYLYAIPYEYYEKYKIRRYGFHGTSHRYVSKRAAEIMGKPYDQLKIITVHVGNGASVAAVKNGVSVDTSMGFTPLEGLVMGTRSGDIDPAIVEFLEKEEGLSAKEVVNILNKKSGVYGLTKGFSSDMRDIEDNAIEGDPVCRLAFDVYEYRIAKYIGAYAAAMNGVDAIVFTAGVGENSPIMREEIIENYLGYLGIKIDKEANDFKGEEKIISTPDSKVIAMVVPTNEELMIAKDTKEIIEKGLDELKI

SEQ ID NO: 131 - DNA, 1251 bp, synthetic construct
  misc_feature 1..1251: note = Variant of acetate kinase
  source 1..1251: mol_type = other DNA
atgcaccatcatcatcatcatggcggtagcggcatgaaagttctggtgattaattctggtagctcctccatcaaatatcagctcctcgatatgaccaacgaaaaggtattagcgaaaggcttggtcgagcgcattggcatcgacggttcgcgtatcgtgcataaagttaacggcgaaaaacacgtgctggaacatgagattaagaatcacgaaattggacttaaattggtcctggatcttcttacggacgaaaaatacggtgtgttgaaggatctcaaagaaatcgatgcagttgggcatcgcgtagtacatggcggcgagcgttttgccagtagcgtgaagattactgacgaagtcttaaagaccatcgagacgttgtcgttcttagctccgttacacaatccaaggaacattatgggtatcaagagcagcatgaaattattaccgggtgtgcctcaagttgccgtctttgatacagcgttccaccagaagatgccggagaaagcctatttgtacgcaatcccctatgagtactacgagaaatataaaattcgccgctatgggtttcatggaacctcacatcgttatgtgagtaaacgtgctgcggaaattatgggcaaaccgtacgatcagctcaagatcattaccgttcacgtgggtaacggcgcatcagttgcggcggtgaagaatggcgtatctgttgacacttccatgggtttcacaccacttgaaggtcttgtcatgggcacgcgcagcggcgatattgatccggccatcgtggaatttcttgagaaagaagaaggattgtcggccaaagaagtcgtcaacatcctcaacaagaaatctggtgtgtatgggctcaccaaaggctttagtagtgacatgcgtgacattgaagataatgctattgaaggtgatcctgtatgccgccttgcattcgatgtgtacgaatatcgtatcgcgaaatatattggcgcatacgctgcggccatgaacggtgttgacgcgatcgtctttaccgcaggagttggcgaaaatagcccgattatgcgcgaagaaattattgagaactacttgggctacttagggatcaagatcgataaagaagccaatgacttcaaaggtgaggagaagatcatttcaacgcccgattccaaagtgattgcgatggtagttccgaccaacgaggagctcatgatcgccaaagacacgaaagaaatcattgagaaagggttggacgagcttaagatc

SEQ ID NO: 132 - protein, 417 aa, synthetic construct
  REGION 1..417: note = Variant of acetate kinase
MHHHHHHGGSGMKVLVINSGSSSIKYQLLDMTNEKVLAKGLVERIGIDGSRIVHKVNGEKHVLEHEIKNHEIGLKLVLDLLTDEKYGVLKDLKEIDAVGHRVVHGGERFASSVKITDEVLKTIETLSFLAPLHNPRNIMGIKSSMKLLPGVPQVAVFDTAFHQKMPEKAYLYAIPYEYYEKYKIRRYGFHGTSHRYVSKRAAEIMGKPYDQLKIITVHVGNGASVAAVKNGVSVDTSMGFTPLEGLVMGTRSGDIDPAIVEFLEKEEGLSAKEVVNILNKKSGVYGLTKGFSSDMRDIEDNAIEGDPVCRLAFDVYEYRIAKYIGAYAAAMNGVDAIVFTAGVGENSPIMREEIIENYLGYLGIKIDKEANDFKGEEKIISTPDSKVIAMVVPTNEELMIAKDTKEIIEKGLDELKI

SEQ ID NO: 133 - DNA, 1251 bp, synthetic construct
  misc_feature 1..1251: note = Variant of acetate kinase
  source 1..1251: mol_type = other DNA
atgcaccatcatcatcatcatggcggtagcggcatgaaagttctggtgattaattctggtagctcctccatcaaatatcagctcctcgatatgaccaacgaaaaggtattagcgaaaggcttggtcgagcgcattggcatcgacggttcgcgtatcgtgcataaagttaacggcgaaaaacacgtgctggaacatgagattaagaatcacgaaattggacttaaattggtcctggatcttcttacggacgaaaaatacggtgtgttgaaggatctcaaagaaatcgatgcagttgggcatcgcgtagtacatggcggcgagcgttttgccagtagcgtgaagattactgacgaagtcttaaagaccatcgagacgttgtcgttcttagctccgttacacaatgtggcgaacattatgggtatcaagagcagcatgaaattattaccgggtgtgcctcaagttgccgtctttgatacagcgttccaccagaagatgccggagaaagcctatttgtacgcaatcccctatgagtactacgagaaatataaaattcgccgctatgggtttcatggaacctcacatcgttatgtgagtaaacgtgctgcggaaattatgggcaaaccgtacgatcagctcaagatcattaccgttcacgtgggtaacggcgcatcagttgcggcggtgaagaatggcgtatctgttgacacttccatgggtttcacaccacttgaaggtcttgtcatgggcacgcgcagcggcgatattgatccggccatcgtggaatttcttgagaaagaagaaggattgtcggccaaagaagtcgtcaacatcctcaacaagaaatctggtgtgtatgggctcaccaaaggctttagtagtgacatgcgtgacattgaagataatgctattgaaggtgatcctgtatgccgccttgcattcgatgtgtacgaatatcgtatcgcgaaatatattggcgcatacgctgcggccatgaacggtgttgacgcgatcgtctttaccgcaggagttggcgaaaatagcccgattatgcgcgaagaaattattgagaactacttgggctacttagggatcaagatcgataaagaagccaatgacttcaaaggtgaggagaagatcatttcaacgcccgattccaaagtgattgcgatggtagttccgaccaacgaggagctcatgatcgccaaagacacgaaagaaatcattgagaaagggttggacgagcttaagatc

SEQ ID NO: 134 - protein, 417 aa, synthetic construct
  REGION 1..417: note = Variant of acetate kinase
MHHHHHHGGSGMKVLVINSGSSSIKYQLLDMTNEKVLAKGLVERIGIDGSRIVHKVNGEKHVLEHEIKNHEIGLKLVLDLLTDEKYGVLKDLKEIDAVGHRVVHGGERFASSVKITDEVLKTIETLSFLAPLHNVANIMGIKSSMKLLPGVPQVAVFDTAFHQKMPEKAYLYAIPYEYYEKYKIRRYGFHGTSHRYVSKRAAEIMGKPYDQLKIITVHVGNGASVAAVKNGVSVDTSMGFTPLEGLVMGTRSGDIDPAIVEFLEKEEGLSAKEVVNILNKKSGVYGLTKGFSSDMRDIEDNAIEGDPVCRLAFDVYEYRIAKYIGAYAAAMNGVDAIVFTAGVGENSPIMREEIIENYLGYLGIKIDKEANDFKGEEKIISTPDSKVIAMVVPTNEELMIAKDTKEIIEKGLDELKI

SEQ ID NO: 135 - DNA, 1251 bp, synthetic construct
  misc_feature 1..1251: note = Variant of acetate kinase
  source 1..1251: mol_type = other DNA
atgcaccatcatcatcatcatggcggtagcggcatgaaagttctggtgattaattctggtagctcctccatcaaatatcagctcctcgatatgaccaacgaaaaggtattagcgaaaggcttggtcgagcgcattggcatcgacggttcgcgtatcgtgcataaagttaacggcgaaaaacacgtgctggaacatgagattaagaatcacgaaattggacttaaattggtcctggatcttcttacggacgaaaaatacggtgtgttgaaggatctcaaagaaatcgatgcagttgggcatcgcgtagtacatggcggcgagcgttttgccagtagcgtgaagattactgacgaagtcttaaagaccatcgagacgttgtcgttcttagctccgttacacaatccagcgaacattatgggtatcaagagcagcatgaaattattaccgggtgtgcctcaagttgccgtctttgatacagcgttccaccagaagatgccggagaaagcctatttgtacgcaatcccctatgagtactacgagaaatataaaattcgccgctatgggtttcatggaacctcacatcgttatgtgagtaaacgtgctgcggaaattatgggcaaaccgtacgatcagctcaagatcattaccgttcacgtgggtaacggcgcatcagttgcggcggtgaagaatggcgtatctgttgacacttccatgggtttcacaccacttgaaggtcttgtcatgggcacgcgcagcggcgatattgatccggccatcgtggaatttcttgagaaagaagaaggattgtcggccaaagaagtcgtcaacatcctcaaccggaaatctggtgtgtatgggctcaccaaaggctttagtagtgacatgcgtgacattgaagataatgctattgaaggtgatcctgtatgccgccttgcattcgatgtgtacgaatatcgtatcgcgaaatatattggcgcatacgctgcggccatgaacggtgttgacgcgatcgtctttaccgcaggagttggcgaaaatagcccgattatgcgcgaagaaattattgagaactacttgggctacttagggatcaagatcgataaagaagccaatgacttcaaaggtgaggagaagatcatttcaacgcccgattccaaagtgattgcgatggtagttccgaccaacgaggagctcatgatcgccaaagacacgaaagaaatcattgagaaagggttggacgagcttaagatc

SEQ ID NO: 136 - protein, 417 aa, synthetic construct
  REGION 1..417: note = Variant of acetate kinase
MHHHHHHGGSGMKVLVINSGSSSIKYQLLDMTNEKVLAKGLVERIGIDGSRIVHKVNGEKHVLEHEIKNHEIGLKLVLDLLTDEKYGVLKDLKEIDAVGHRVVHGGERFASSVKITDEVLKTIETLSFLAPLHNPANIMGIKSSMKLLPGVPQVAVFDTAFHQKMPEKAYLYAIPYEYYEKYKIRRYGFHGTSHRYVSKRAAEIMGKPYDQLKIITVHVGNGASVAAVKNGVSVDTSMGFTPLEGLVMGTRSGDIDPAIVEFLEKEEGLSAKEVVNILNRKSGVYGLTKGFSSDMRDIEDNAIEGDPVCRLAFDVYEYRIAKYIGAYAAAMNGVDAIVFTAGVGENSPIMREEIIENYLGYLGIKIDKEANDFKGEEKIISTPDSKVIAMVVPTNEELMIAKDTKEIIEKGLDELKI

SEQ ID NO: 137 - DNA, 1251 bp, synthetic construct
  misc_feature 1..1251: note = Variant of acetate kinase
  source 1..1251: mol_type = other DNA
atgcaccatcatcatcatcatggcggtagcggcatgaaagttctggtgattaattctggtagctcctccatcaaatatcagctcctcgatatgaccaacgaaaaggtattagcgaaaggcttggtcgagcgcattggcatcgacggttcgcgtatcgtgcataaagttaacggcgaaaaacacgtgctggaacatgagattaagaatcacgaaattggacttaaattggtcctggatcttcttacggacgaaaaatacggtgtgttgaaggatctcaaagaaatcgatgcagttgggcatcgcgtagtacatggcggcgagcgttttgccagtagcgtgaagattactgacgaagtcttaaagaccatcgagacgttgtcgttcttagctccgttacacaatccagcgattattatgggtatcaagagcagcatgaaattattaccgggtgtgcctcaagttgccgtctttgatacagcgttccaccagaagatgccggagaaagcctatttgtacgcaatcccctatgagtactacgagaaatataaaattcgccgctatgggtttcatggaacctcacatcgttatgtgagtaaacgtgctgcggaaattatgggcaaaccgtacgatcagctcaagatcattaccgttcacgtgggtaacggcgcatcagttgcggcggtgaagaatggcgtatctgttgacacttccatgggtttcacaccacttgaaggtcttgtcatgggcacgcgcagcggcgatattgatccggccatcgtggaatttcttgagaaagaagaaggattgtcggccaaagaagtcgtcaacatcctcaacaagaaatctggtgtgtatgggctcaccaaaggctttagtagtgacatgcgtgacattgaagataatgctattgaaggtgatcctgtatgccgccttgcattcgatgtgtacgaatatcgtatcgcgaaatatattggcgcatacgctgcggccatgaacggtgttgacgcgatcgtctttaccgcaggagttggcgaaaatagcccgattatgcgcgaagaaattattgagaactacttgggctacttagggatcaagatcgataaagaagccaatgacttcaaaggtgaggagaagatcatttcaacgcccgattccaaagtgattgcgatggtagttccgaccaacgaggagctcatgatcgccaaagacacgaaagaaatcattgagaaagggttggacgagcttaagatc

SEQ ID NO: 138 - protein, 417 aa, synthetic construct
  REGION 1..417: note = Variant of acetate kinase
MHHHHHHGGSGMKVLVINSGSSSIKYQLLDMTNEKVLAKGLVERIGIDGSRIVHKVNGEKHVLEHEIKNHEIGLKLVLDLLTDEKYGVLKDLKEIDAVGHRVVHGGERFASSVKITDEVLKTIETLSFLAPLHNPAIIMGIKSSMKLLPGVPQVAVFDTAFHQKMPEKAYLYAIPYEYYEKYKIRRYGFHGTSHRYVSKRAAEIMGKPYDQLKIITVHVGNGASVAAVKNGVSVDTSMGFTPLEGLVMGTRSGDIDPAIVEFLEKEEGLSAKEVVNILNKKSGVYGLTKGFSSDMRDIEDNAIEGDPVCRLAFDVYEYRIAKYIGAYAAAMNGVDAIVFTAGVGENSPIMREEIIENYLGYLGIKIDKEANDFKGEEKIISTPDSKVIAMVVPTNEELMIAKDTKEIIEKGLDELKI

SEQ ID NO: 139 - DNA, 1251 bp, synthetic construct
  misc_feature 1..1251: note = Variant of acetate kinase
  source 1..1251: mol_type = other DNA
atgcaccatcatcatcatcatggcggtagcggcatgaaagttctggtgattaattctggtagctcctccatcaaatatcagctcctcgatatgaccaacgaaaaggtattagcgaaaggcttggtcgagcgcattggcatcgacggttcgcgtatcgtgcataaagttaacggcgaaaaacacgtgctggaacatgagattaagaatcacgaaattggacttaaattggtcctggatcttcttacggacgaaaaatacggtgtgttgaaggatctcaaagaaatcgatgcagttgggcatcgcgtagtacatggcggcgagcgttttgccagtagcgtgaagattactgacgaagtcttaaagaccatcgagacgtgctcgttcttagctccgttacacaatccagcgaacattatgggtatcaagagcagcatgaaattattaccgggtgtgcctcaagttgccgtctttgatacagcgttccaccagaagatgccggagaaagcctatttgtacgcaatcccctatgagtactacgagaaatataaaattcgccgctatgggtttcatggaacctcacatcgttatgtgagtaaacgtgctgcggaaattatgggcaaaccgtacgatcagctcaagatcattaccgttcacgtgggtaacggcgcatcagttgcggcggtgaagaatggcgtatctgttgacacttccatgggtttcacaccacttgaaggtcttgtcatgggcacgcgcagcggcgatattgatccggccatcgtggaatttcttgagaaagaagaaggattgtcggccaaagaagtcgtcaacatcctcaacaagaaatctggtgtgtatgggctcaccaaaggctttagtagtgacatgcgtgacattgaagataatgctattgaaggtgatcctgtatgccgccttgcattcgatgtgtacgaatatcgtatcgcgaaatatattggcgcatacgctgcggccatgaacggtgttgacgcgatcgtctttaccgcaggagttggcgaaaatagcccgattatgcgcgaagaaattattgagaactacttgggctacttagggatcaagatcgataaagaagccaatgacttcaaaggtgaggagaagatcatttcaacgcccgattccaaagtgattgcgatggtagttccgaccaacgaggagctcatgatcgccaaagacacgaaagaaatcattgagaaagggttggacgagcttaagatc

SEQ ID NO: 140 - protein, 417 aa, synthetic construct
  REGION 1..417: note = Variant of acetate kinase
MHHHHHHGGSGMKVLVINSGSSSIKYQLLDMTNEKVLAKGLVERIGIDGSRIVHKVNGEKHVLEHEIKNHEIGLKLVLDLLTDEKYGVLKDLKEIDAVGHRVVHGGERFASSVKITDEVLKTIETCSFLAPLHNPANIMGIKSSMKLLPGVPQVAVFDTAFHQKMPEKAYLYAIPYEYYEKYKIRRYGFHGTSHRYVSKRAAEIMGKPYDQLKIITVHVGNGASVAAVKNGVSVDTSMGFTPLEGLVMGTRSGDIDPAIVEFLEKEEGLSAKEVVNILNKKSGVYGLTKGFSSDMRDIEDNAIEGDPVCRLAFDVYEYRIAKYIGAYAAAMNGVDAIVFTAGVGENSPIMREEIIENYLGYLGIKIDKEANDFKGEEKIISTPDSKVIAMVVPTNEELMIAKDTKEIIEKGLDELKI

SEQ ID NO: 141 - DNA, 1251 bp, synthetic construct
  misc_feature 1..1251: note = Variant of acetate kinase
  source 1..1251: mol_type = other DNA
atgcaccatcatcatcatcatggcggtagcggcatgaaagttctggtgattaattctggtagctcctccatcaaatatcagctcctcgatatgaccaacgaaaaggtattagcgaaaggcttggtcgagcgcattggcatcgacggttcgcgtatcgtgcataaagttaacggcgaaaaacacgtgctggaacatgagattaagaatcacgaaattggacttaaattggtcctggatcttcttacggacgaaaaatacggtgtgttgaaggatctcaaagaaatcgatgcagttgggcatcgcgtagtacatggcggcgagcgttttgccagtagcgtgaagattactgacgaagtcttaaagaccatcgagacgttgtcgttcttagctccgttacacaatccagcgaacattatgggtatcaagagcagcatgaaattattaccgggtgtgcctcaagttgccgtctttgatacagcgttccaccagaagatgccggagaaagcctatttgtacgcaatcccctatgagtactacgagaaatataaaattcgccgctatgggtttcatggaacctcacatcgttatgtgagtaaacgtgctgcggaaattatgggcaaaccgtacgatcagctcaagatcattaccgttcacgtgggtaacggcgcatcagttgcggcggtgaagaatggcgtatctgttgacacttccatgggtttcacaccacttgaaggtcttgtcatgggcacgcgcagcggcgatattgatccggccatcgtggaatttcttgagaaagaagaaggattgtcggccaaagaagtcgtcaacatcctcaacaagaaatctggtgtgtatgggctcaccaaaggctttagtagtgacatgcgtgacattgaagataatgctattgaaggtgatcctgtatgccgccttgcattcgatgtgtacgaatatcgtatcgcgaaatatattggcgcatacgctgcggccatgaacggtgttgacgcgatcgtctttaccgcaggagttggcgaaaatagcccgattatgcgcgaagaaattattgagaactacttgggctacttagggatcaagatcgataaagaagccaatgacttcaaaggtgaggagaagatcatttcaacgcccgattccaaagtgattgcgatggtagttccgaccaacgaggagctcatgatcgccaaagaccttaaagaaatcattgagaaagggttggacgagcttaagatc

SEQ ID NO: 142 - protein, 417 aa, synthetic construct
  REGION 1..417: note = Variant of acetate kinase
MHHHHHHGGSGMKVLVINSGSSSIKYQLLDMTNEKVLAKGLVERIGIDGSRIVHKVNGEKHVLEHEIKNHEIGLKLVLDLLTDEKYGVLKDLKEIDAVGHRVVHGGERFASSVKITDEVLKTIETLSFLAPLHNPANIMGIKSSMKLLPGVPQVAVFDTAFHQKMPEKAYLYAIPYEYYEKYKIRRYGFHGTSHRYVSKRAAEIMGKPYDQLKIITVHVGNGASVAAVKNGVSVDTSMGFTPLEGLVMGTRSGDIDPAIVEFLEKEEGLSAKEVVNILNKKSGVYGLTKGFSSDMRDIEDNAIEGDPVCRLAFDVYEYRIAKYIGAYAAAMNGVDAIVFTAGVGENSPIMREEIIENYLGYLGIKIDKEANDFKGEEKIISTPDSKVIAMVVPTNEELMIAKDLKEIIEKGLDELKI

SEQ ID NO: 143 - DNA, 1251 bp, synthetic construct
  misc_feature 1..1251: note = Variant of acetate kinase
  source 1..1251: mol_type = other DNA
atgcaccatcatcatcatcatggcggtagcggcatgaaagttctggtgattaattctggtagctcctccatcaaatatcagctcctcgatatgaccaacgaaaaggtattagcgaaaggcttggtcgagcgcattggcatcgacggttcgcgtatcgtgcataaagttaacggcgaaaaacacgtgctggaacatgagattaagaatcacgaaattggacttaaattggtcctggatcttcttacggacgaaaaatacggtgtgttgaaggatctcaaagaaatcgatgcagttgggcatcgcgtagtacatggcggcgagcgttttgccagtagcgtgaagattactgacgaagtcttaaagaccatcgagacgttgtcgttcttagctccgttacacaatccagcgaacattatgggtatcaagagcagcatgaaattattaccgggtgtgcctcaagttgccgtctttgatacagcgttccaccagaagatgccggagaaagcctatttgtacgcaatcccctatgagtactacgagaaatataaaattcgccgctatgggtttcatggaacctcacatcgttatgtgagtaaacgtgctgcggaaattatgggcaaaccgtacgatcagctcaagatcattaccgttcacgtgggtaacggcgcatcagttgcggcggtgaagaatggcgtatctgttgacacttccatgggtttcacaccacttgaaggtcttgtcatgggcacgcgcagcggcgatattgatccggccatcgtggaatttcttgagaaagaagaaggattgtcggccaaagaagtcgtcaacatcctcaacaagaaatctggtgtgctggggctcaccaaaggctttagtagtgacatgcgtgacattgaagataatgctattgaaggtgatcctgtatgccgccttgcattcgatgtgtacgaatatcgtatcgcgaaatatattggcgcatacgctgcggccatgaacggtgttgacgcgatcgtctttaccgcaggagttggcgaaaatagcccgattatgcgcgaagaaattattgagaactacttgggctacttagggatcaagatcgataaagaagccaatgacttcaaaggtgaggagaagatcatttcaacgcccgattccaaagtgattgcgatggtagttccgaccaacgaggagctcatgatcgccaaagacacgaaagaaatcattgagaaagggttggacgagcttaagatc

SEQ ID NO: 144 - protein, 417 aa, synthetic construct
  REGION 1..417: note = Variant of acetate kinase
MHHHHHHGGSGMKVLVINSGSSSIKYQLLDMTNEKVLAKGLVERIGIDGSRIVHKVNGEKHVLEHEIKNHEIGLKLVLDLLTDEKYGVLKDLKEIDAVGHRVVHGGERFASSVKITDEVLKTIETLSFLAPLHNPANIMGIKSSMKLLPGVPQVAVFDTAFHQKMPEKAYLYAIPYEYYEKYKIRRYGFHGTSHRYVSKRAAEIMGKPYDQLKIITVHVGNGASVAAVKNGVSVDTSMGFTPLEGLVMGTRSGDIDPAIVEFLEKEEGLSAKEVVNILNKKSGVLGLTKGFSSDMRDIEDNAIEGDPVCRLAFDVYEYRIAKYIGAYAAAMNGVDAIVFTAGVGENSPIMREEIIENYLGYLGIKIDKEANDFKGEEKIISTPDSKVIAMVVPTNEELMIAKDTKEIIEKGLDELKI

SEQ ID NO: 145 - DNA, 1251 bp, synthetic construct
  misc_feature 1..1251: note = Variant of acetate kinase
  source 1..1251: mol_type = other DNA
atgcaccatcatcatcatcatggcggtagcggcatgaaagttctggtgattaattctggtagctcctccatcaaatatcagctcctcgatatgaccaacgaaaaggtattagcgaaaggcttggtcgagcgcattggcatcgacggttcgcgtatcgtgcataaagttaacggcgaaaaacacgtgctggaacatgagattaagaatcacgaaattggacttaaattggtcctggatcttcttacggacgaaaaatacggtgtgttgaaggatctcaaagaaatcgatgcagttgggcatcgcgtagtacatggcggcgagcgttttgccagtagcgtgaagattactgacgaagtcttaaagaccatcgagacgttgtcgttcttagctccgttacacaatccagcgaacattatgggtcgtaagagcagcatgaaattattaccgggtgtgcctcaagttgccgtctttgatacagcgttccaccagaagatgccggagaaagcctatttgtacgcaatcccctatgagtactacgagaaatataaaattcgccgctatgggtttcatggaacctcacatcgttatgtgagtaaacgtgctgcggaaattatgggcaaaccgtacgatcagctcaagatcattaccgttcacgtgggtaacggcgcatcagttgcggcggtgaagaatggcgtatctgttgacacttccatgggtttcacaccacttgaaggtcttgtcatgggcacgcgcagcggcgatattgatccggccatcgtggaatttcttgagaaagaagaaggattgtcggccaaagaagtcgtcaacatcctcaacaagaaatctggtgtgtatgggctcaccaaaggctttagtagtgacatgcgtgacattgaagataatgctattgaaggtgatcctgtatgccgccttgcattcgatgtgtacgaatatcgtatcgcgaaatatattggcgcatacgctgcggccatgaacggtgttgacgcgatcgtctttaccgcaggagttggcgaaaatagcccgattatgcgcgaagaaattattgagaactacttgggctacttagggatcaagatcgataaagaagccaatgacttcaaaggtgaggagaagatcatttcaacgcccgattccaaagtgattgcgatggtagttccgaccaacgaggagctcatgatcgccaaagacacgaaagaaatcattgagaaagggttggacgagcttaagatc

SEQ ID NO: 146 - protein, 417 aa, synthetic construct
  REGION 1..417: note = Variant of acetate kinase
MHHHHHHGGSGMKVLVINSGSSSIKYQLLDMTNEKVLAKGLVERIGIDGSRIVHKVNGEKHVLEHEIKNHEIGLKLVLDLLTDEKYGVLKDLKEIDAVGHRVVHGGERFASSVKITDEVLKTIETLSFLAPLHNPANIMGRKSSMKLLPGVPQVAVFDTAFHQKMPEKAYLYAIPYEYYEKYKIRRYGFHGTSHRYVSKRAAEIMGKPYDQLKIITVHVGNGASVAAVKNGVSVDTSMGFTPLEGLVMGTRSGDIDPAIVEFLEKEEGLSAKEVVNILNKKSGVYGLTKGFSSDMRDIEDNAIEGDPVCRLAFDVYEYRIAKYIGAYAAAMNGVDAIVFTAGVGENSPIMREEIIENYLGYLGIKIDKEANDFKGEEKIISTPDSKVIAMVVPTNEELMIAKDTKEIIEKGLDELKI

SEQ ID NO: 147 - DNA, 1251 bp, synthetic construct
  misc_feature 1..1251: note = Variant of acetate kinase
  source 1..1251: mol_type = other DNA
atgcaccatcatcatcatcatggcggtagcggcatgaaagttctggtgattaattgcggtagctcctccatcaaatatcagctcctcgatatgaccaacgaaaaggtattagcgaaaggcttggtcgagcgcattggcatcgacggttcgcgtatcgtgcataaagttaacggcgaaaaacacgtgctggaacatgagattaagaatcacgaaattggacttaaattggtcctggatcttcttacggacgaaaaatacggtgtgttgaaggatctcaaagaaatcgatgcagttgggcatcgcgtagtacatggcggcgagcgttttgccagtagcgtgaagattactgacgaagtcttaaagaccatcgagacgttgtcgttcttagctccgttacacaatccagcgaacattatgggtatcaagagcagcatgaaattattaccgggtgtgcctcaagttgccgtctttgatacagcgttccaccagaagatgccggagaaagcctatttgtacgcaatcccctatgagtactacgagaaatataaaattcgccgctatgggtttcatggaacctcacatcgttatgtgagtaaacgtgctgcggaaattatgggcaaaccgtacgatcagctcaagatcattaccgttcacgtgggtaacggcgcatcagttgcggcggtgaagaatggcgtatctgttgacacttccatgggtttcacaccacttgaaggtcttgtcatgggcacgcgcagcggcgatattgatccggccatcgtggaatttcttgagaaagaagaaggattgtcggccaaagaagtcgtcaacatcctcaacaagaaatctggtgtgtatgggctcaccaaaggctttagtagtgacatgcgtgacattgaagataatgctattgaaggtgatcctgtatgccgccttgcattcgatgtgtacgaatatcgtatcgcgaaatatattggcgcatacgctgcggccatgaacggtgttgacgcgatcgtctttaccgcaggagttggcgaaaatagcccgattatgcgcgaagaaattattgagaactacttgggctacttagggatcaagatcgataaagaagccaatgacttcaaaggtgaggagaagatcatttcaacgcccgattccaaagtgattgcgatggtagttccgaccaacgaggagctcatgatcgccaaagacacgaaagaaatcattgagaaagggttggacgagcttaagatc

SEQ ID NO: 148 - protein, 417 aa, synthetic construct
  REGION 1..417: note = Variant of acetate kinase
MHHHHHHGGSGMKVLVINCGSSSIKYQLLDMTNEKVLAKGLVERIGIDGSRIVHKVNGEKHVLEHEIKNHEIGLKLVLDLLTDEKYGVLKDLKEIDAVGHRVVHGGERFASSVKITDEVLKTIETLSFLAPLHNPANIMGIKSSMKLLPGVPQVAVFDTAFHQKMPEKAYLYAIPYEYYEKYKIRRYGFHGTSHRYVSKRAAEIMGKPYDQLKIITVHVGNGASVAAVKNGVSVDTSMGFTPLEGLVMGTRSGDIDPAIVEFLEKEEGLSAKEVVNILNKKSGVYGLTKGFSSDMRDIEDNAIEGDPVCRLAFDVYEYRIAKYIGAYAAAMNGVDAIVFTAGVGENSPIMREEIIENYLGYLGIKIDKEANDFKGEEKIISTPDSKVIAMVVPTNEELMIAKDTKEIIEKGLDELKI

SEQ ID NO: 149 - DNA, 1251 bp, synthetic construct
  misc_feature 1..1251: note = Variant of acetate kinase
  source 1..1251: mol_type = other DNA
atgcaccatcatcatcatcatggcggtagcggcatgaaagttctggtgattaattctggtagctcctccatcaaatatcagctcctcgatatgaccaacgaaaaggtattagcgaaaggcttggtcgagcgcattggcatcgacggttcgcgtatcgtgcataaagttaacggcgaaaaacacgtgctggaacatgagattaagaatcacgaaattggacttaaattggtcctggatcttcttacggacgaaaaatacggtgtgttgaaggatctcaaagaaatcgatgcagttgggcatcgcgtagtacatggcggcgagcgttttgccagtagcgtgaagattactgacgaagtcttaaagaccatcgagacgttgtcgttcttagctccgttacacaatccagcggctattatgggtatcaagagcagcatgaaattattaccgggtgtgcctcaagttgccgtctttgatacagcgttccaccagaagatgccggagaaagcctatttgtacgcaatcccctatgagtactacgagaaatataaaattcgccgctatgggtttcatggaacctcacatcgttatgtgagtaaacgtgctgcggaaattatgggcaaaccgtacgatcagctcaagatcattaccgttcacgtgggtaacggcgcatcagttgcggcggtgaagaatggcgtatctgttgacacttccatgggtttcacaccacttgaaggtcttgtcatgggcacgcgcagcggcgatattgatccggccatcgtggaatttcttgagaaagaagaaggattgtcggccaaagaagtcgtcaacatcctcaacaagaaatctggtgtgtatgggctcaccaaaggctttagtagtgacatgcgtgacattgaagataatgctattgaaggtgatcctgtatgccgccttgcattcgatgtgtacgaatatcgtatcgcgaaatatattggcgcatacgctgcggccatgaacggtgttgacgcgatcgtctttaccgcaggagttggcgaaaatagcccgattatgcgcgaagaaattattgagaactacttgggctacttagggatcaagatcgataaagaagccaatgacttcaaaggtgaggagaagatcatttcaacgcccgattccaaagtgattgcgatggtagttccgaccaacgaggagctcatgatcgccaaagacacgaaagaaatcattgagaaagggttggacgagcttaagatc

SEQ ID NO: 150 - protein, 417 aa, synthetic construct
  REGION 1..417: note = Variant of acetate kinase
MHHHHHHGGSGMKVLVINSGSSSIKYQLLDMTNEKVLAKGLVERIGIDGSRIVHKVNGEKHVLEHEIKNHEIGLKLVLDLLTDEKYGVLKDLKEIDAVGHRVVHGGERFASSVKITDEVLKTIETLSFLAPLHNPAAIMGIKSSMKLLPGVPQVAVFDTAFHQKMPEKAYLYAIPYEYYEKYKIRRYGFHGTSHRYVSKRAAEIMGKPYDQLKIITVHVGNGASVAAVKNGVSVDTSMGFTPLEGLVMGTRSGDIDPAIVEFLEKEEGLSAKEVVNILNKKSGVYGLTKGFSSDMRDIEDNAIEGDPVCRLAFDVYEYRIAKYIGAYAAAMNGVDAIVFTAGVGENSPIMREEIIENYLGYLGIKIDKEANDFKGEEKIISTPDSKVIAMVVPTNEELMIAKDTKEIIEKGLDELKI

SEQ ID NO: 151 - DNA, 1251 bp, synthetic construct
  misc_feature 1..1251: note = Variant of acetate kinase
  source 1..1251: mol_type = other DNA
atgcaccatcatcatcatcatggcggtagcggcatgaaagttctggtgattaattctggtagctcctccatcaaatatcagctcctcgatatgaccaacgaaaaggtattagcgaaaggcttggtcgagcgcattggcatcgacggttcgcgtatcgtgcataaagttaacggcgaaaaacacgtgctggaacatgagattaagaatcacgaaattggacttaaattggtcctggatcttcttacggacgaaaaatacggtgtgttgaaggatctcaaagaaatcgatgcagttgggcatcgcgtagtacatggcggcgagcgttttgccagtagcgtgaagattactgacgaagtcttaaagaccatcgagacgttgtcgttcttagctccgttacacaatccaatgaacattatgggtatcaagagcagcatgaaattattaccgggtgtgcctcaagttgccgtctttgatacagcgttccaccagaagatgccggagaaagcctatttgtacgcaatcccctatgagtactacgagaaatataaaattcgccgctatgggtttcatggaacctcacatcgttatgtgagtaaacgtgctgcggaaattatgggcaaaccgtacgatcagctcaagatcattaccgttcacgtgggtaacggcgcatcagttgcggcggtgaagaatggcgtatctgttgacacttccatgggtttcacaccacttgaaggtcttgtcatgggcacgcgcagcggcgatattgatccggccatcgtggaatttcttgagaaagaagaaggattgtcggccaaagaagtcgtcaacatcctcaacaagaaatctggtgtgtatgggctcaccaaaggctttagtagtgacatgcgtgacattgaagataatgctattgaaggtgatcctgtatgccgccttgcattcgatgtgtacgaatatcgtatcgcgaaatatattggcgcatacgctgcggccatgaacggtgttgacgcgatcgtctttaccgcaggagttggcgaaaatagcccgattatgcgcgaagaaattattgagaactacttgggctacttagggatcaagatcgataaagaagccaatgacttcaaaggtgaggagaagatcatttcaacgcccgattccaaagtgattgcgatggtagttccgaccaacgaggagctcatgatcgccaaagacacgaaagaaatcattgagaaagggttggacgagcttaagatc

SEQ ID NO: 152 - protein, 417 aa, synthetic construct
  REGION 1..417: note = Variant of acetate kinase
MHHHHHHGGSGMKVLVINSGSSSIKYQLLDMTNEKVLAKGLVERIGIDGSRIVHKVNGEKHVLEHEIKNHEIGLKLVLDLLTDEKYGVLKDLKEIDAVGHRVVHGGERFASSVKITDEVLKTIETLSFLAPLHNPMNIMGIKSSMKLLPGVPQVAVFDTAFHQKMPEKAYLYAIPYEYYEKYKIRRYGFHGTSHRYVSKRAAEIMGKPYDQLKIITVHVGNGASVAAVKNGVSVDTSMGFTPLEGLVMGTRSGDIDPAIVEFLEKEEGLSAKEVVNILNKKSGVYGLTKGFSSDMRDIEDNAIEGDPVCRLAFDVYEYRIAKYIGAYAAAMNGVDAIVFTAGVGENSPIMREEIIENYLGYLGIKIDKEANDFKGEEKIISTPDSKVIAMVVPTNEELMIAKDTKEIIEKGLDELKI

SEQ ID NO: 153 - DNA, 1251 bp, synthetic construct
  misc_feature 1..1251: note = Variant of acetate kinase
  source 1..1251: mol_type = other DNA
atgcaccatcatcatcatcatggcggtagcggcatgaaagttctggtgattaattctggtagctcctccatcaaatatcagctcctcgatatgaccaacgaaaaggtattagcgaaaggcttggtcgagcgcattctgatcgacggttcgcgtatcgtgcataaagttaacggcgaaaaacacgtgctggaacatgagattaagaatcacgaaattggacttaaattggtcctggatcttcttacggacgaaaaatacggtgtgttgaaggatctcaaagaaatcgatgcagttgggcatcgcgtagtacatggcggcgagcgttttgccagtagcgtgaagattactgacgaagtcttaaagaccatcgagacgttgtcgttcttagctccgttacacaatccagcgaacattatgggtatcaagagcagcatgaaattattaccgggtgtgcctcaagttgccgtctttgatacagcgttccaccagaagatgccggagaaagcctatttgtacgcaatcccctatgagtactacgagaaatataaaattcgccgctatgggtttcatggaacctcacatcgttatgtgagtaaacgtgctgcggaaattatgggcaaaccgtacgatcagctcaagatcattaccgttcacgtgggtaacggcgcatcagttgcggcggtgaagaatggcgtatctgttgacacttccatgggtttcacaccacttgaaggtcttgtcatgggcacgcgcagcggcgatattgatccggccatcgtggaatttcttgagaaagaagaaggattgtcggccaaagaagtcgtcaacatcctcaacaagaaatctggtgtgtatgggctcaccaaaggctttagtagtgacatgcgtgacattgaagataatgctattgaaggtgatcctgtatgccgccttgcattcgatgtgtacgaatatcgtatcgcgaaatatattggcgcatacgctgcggccatgaacggtgttgacgcgatcgtctttaccgcaggagttggcgaaaatagcccgattatgcgcgaagaaattattgagaactacttgggctacttagggatcaagatcgataaagaagccaatgacttcaaaggtgaggagaagatcatttcaacgcccgattccaaagtgattgcgatggtagttccgaccaacgaggagctcatgatcgccaaagacacgaaagaaatcattgagaaagggttggacgagcttaagatc

SEQ ID NO: 154 - protein, 417 aa, synthetic construct
  REGION 1..417: note = Variant of acetate kinase
MHHHHHHGGSGMKVLVINSGSSSIKYQLLDMTNEKVLAKGLVERILIDGSRIVHKVNGEKHVLEHEIKNHEIGLKLVLDLLTDEKYGVLKDLKEIDAVGHRVVHGGERFASSVKITDEVLKTIETLSFLAPLHNPANIMGIKSSMKLLPGVPQVAVFDTAFHQKMPEKAYLYAIPYEYYEKYKIRRYGFHGTSHRYVSKRAAEIMGKPYDQLKIITVHVGNGASVAAVKNGVSVDTSMGFTPLEGLVMGTRSGDIDPAIVEFLEKEEGLSAKEVVNILNKKSGVYGLTKGFSSDMRDIEDNAIEGDPVCRLAFDVYEYRIAKYIGAYAAAMNGVDAIVFTAGVGENSPIMREEIIENYLGYLGIKIDKEANDFKGEEKIISTPDSKVIAMVVPTNEELMIAKDTKEIIEKGLDELKI

SEQ ID NO: 155 - DNA, 1251 bp, synthetic construct
  misc_feature 1..1251: note = Variant of acetate kinase
  source 1..1251: mol_type = other DNA
atgcaccatcatcatcatcatggcggtagcggcatgaaagttctggtgattaattctggtagctcctccatcaaatatcagctcctcgatatgaccaacgaaaaggtattagcgaaaggcttggtcgagcgcattggcatcgacggttcgcgtatcgtgcataaagttaacggcgaaaaacacgtgctggaacatgagattaagaatcacgaaattggacttaaattggtcctggatcttcttacggacgaaaaatacggtgtgttgaaggatctcaaagaaatcgatgcagttgggcatcgcgtagtacatggcggcgagcgttttgccagtagcgtgaagattactgacgaagtcttaaagaccatcgagacgttgtcgttcttagctccgttacacaatccagcgaacattatgggtatctttagcagcatgaaattattaccgggtgtgcctcaagttgccgtctttgatacagcgttccaccagaagatgccggagaaagcctatttgtacgcaatcccctatgagtactacgagaaatataaaattcgccgctatgggtttcatggaacctcacatcgttatgtgagtaaacgtgctgcggaaattatgggcaaaccgtacgatcagctcaagatcattaccgttcacgtgggtaacggcgcatcagttgcggcggtgaagaatggcgtatctgttgacacttccatgggtttcacaccacttgaaggtcttgtcatgggcacgcgcagcggcgatattgatccggccatcgtggaatttcttgagaaagaagaaggattgtcggccaaagaagtcgtcaacatcctcaacaagaaatctggtgtgtatgggctcaccaaaggctttagtagtgacatgcgtgacattgaagataatgctattgaaggtgatcctgtatgccgccttgcattcgatgtgtacgaatatcgtatcgcgaaatatattggcgcatacgctgcggccatgaacggtgttgacgcgatcgtctttaccgcaggagttggcgaaaatagcccgattatgcgcgaagaaattattgagaactacttgggctacttagggatcaagatcgataaagaagccaatgacttcaaaggtgaggagaagatcatttcaacgcccgattccaaagtgattgcgatggtagttccgaccaacgaggagctcatgatcgccaaagacacgaaagaaatcattgagaaagggttggacgagcttaagatc

SEQ ID NO: 156 - protein, 417 aa, synthetic construct
  REGION 1..417: note = Variant of acetate kinase
MHHHHHHGGSGMKVLVINSGSSSIKYQLLDMTNEKVLAKGLVERIGIDGSRIVHKVNGEKHVLEHEIKNHEIGLKLVLDLLTDEKYGVLKDLKEIDAVGHRVVHGGERFASSVKITDEVLKTIETLSFLAPLHNPANIMGIFSSMKLLPGVPQVAVFDTAFHQKMPEKAYLYAIPYEYYEKYKIRRYGFHGTSHRYVSKRAAEIMGKPYDQLKIITVHVGNGASVAAVKNGVSVDTSMGFTPLEGLVMGTRSGDIDPAIVEFLEKEEGLSAKEVVNILNKKSGVYGLTKGFSSDMRDIEDNAIEGDPVCRLAFDVYEYRIAKYIGAYAAAMNGVDAIVFTAGVGENSPIMREEIIENYLGYLGIKIDKEANDFKGEEKIISTPDSKVIAMVVPTNEELMIAKDTKEIIEKGLDELKI

SEQ ID NO: 157 - DNA, 1251 bp, synthetic construct
  misc_feature 1..1251: note = Variant of acetate kinase
  source 1..1251: mol_type = other DNA
atgcaccatcatcatcatcatggcggtagcggcatgaaagttattgtgattaattctggtagctcctccatcaaatatcagctcctcgatatgaccaacgaaaaggtattagcgaaaggcttggtcgagcgcattggcatcgacggttcgcgtatcgtgcataaagttaacggcgaaaaacacgtgctggaacatgagattaagaatcacgaaattggacttaaattggtcctggatcttcttacggacgaaaaatacggtgtgttgaaggatctcaaagaaatcgatgcagttgggcatcgcgtagtacatggcggcgagcgttttgccagtagcgtgaagattactgacgaagtcttaaagaccatcgagacgttgtcgttcttagctccgttacacaatccagcgaacattatgggtatcaagagcagcatgaaattattaccgggtgtgcctcaagttgccgtctttgatacagcgttccaccagaagatgccggagaaagcctatttgtacgcaatcccctatgagtactacgagaaatataaaattcgccgctatgggtttcatggaacctcacatcgttatgtgagtaaacgtgctgcggaaattatgggcaaaccgtacgatcagctcaagatcattaccgttcacgtgggtaacggcgcatcagttgcggcggtgaagaatggcgtatctgttgacacttccatgggtttcacaccacttgaaggtcttgtcatgggcacgcgcagcggcgatattgatccggccatcgtggaatttcttgagaaagaagaaggattgtcggccaaagaagtcgtcaacatcctcaacaagaaatctggtgtgtatgggctcaccaaaggctttagtagtgacatgcgtgacattgaagataatgctattgaaggtgatcctgtatgccgccttgcattcgatgtgtacgaatatcgtatcgcgaaatatattggcgcatacgctgcggccatgaacggtgttgacgcgatcgtctttaccgcaggagttggcgaaaatagcccgattatgcgcgaagaaattattgagaactacttgggctacttagggatcaagatcgataaagaagccaatgacttcaaaggtgaggagaagatcatttcaacgcccgattccaaagtgattgcgatggtagttccgaccaacgaggagctcatgatcgccaaagacacgaaagaaatcattgagaaagggttggacgagcttaagatc

SEQ ID NO: 158 - protein, 417 aa, synthetic construct
  REGION 1..417: note = Variant of acetate kinase
MHHHHHHGGSGMKVIVINSGSSSIKYQLLDMTNEKVLAKGLVERIGIDGSRIVHKVNGEKHVLEHEIKNHEIGLKLVLDLLTDEKYGVLKDLKEIDAVGHRVVHGGERFASSVKITDEVLKTIETLSFLAPLHNPANIMGIKSSMKLLPGVPQVAVFDTAFHQKMPEKAYLYAIPYEYYEKYKIRRYGFHGTSHRYVSKRAAEIMGKPYDQLKIITVHVGNGASVAAVKNGVSVDTSMGFTPLEGLVMGTRSGDIDPAIVEFLEKEEGLSAKEVVNILNKKSGVYGLTKGFSSDMRDIEDNAIEGDPVCRLAFDVYEYRIAKYIGAYAAAMNGVDAIVFTAGVGENSPIMREEIIENYLGYLGIKIDKEANDFKGEEKIISTPDSKVIAMVVPTNEELMIAKDTKEIIEKGLDELKI

SEQ ID NO: 159 - DNA, 1251 bp, synthetic construct
  misc_feature 1..1251: note = Variant of acetate kinase
  source 1..1251: mol_type = other DNA
atgcaccatcatcatcatcatggcggtagcggcatgaaagttctggtgattaattctggtagctcctccatcaaatatcagctcctcgatatgaccaacgaaaaggtattagcgaaaggcttggtcgagcgcattggcatcgacggttcgcgtatcgtgcataaagttaacggcgaaaaacacgtgctggaacatgagattaagaatcacgaaattggacttaaattggtcctggatcttcttacggacgaaaaatacggtgtgttgaaggatctcaaagaaatcgatgcagttgggcatcgcgtagtacatggcggcgagcgttttgccagtagcgtgaagattactgacgaagtcttaaagaccatcgagacgttgtcgttcttagctccgttacacaatccagcgaacattatgggtatcaagagcagcatgaaattattaccgggtgtgcctcaagttgccgtctttgatacagcgttccaccagaagatgccggagaaagcctatttgtacgcaatcccctatgagtactacgagaaatataaaattcgccgctatgggtttcatggaacctcacatcgttatgtgagtaaacgtgctgcggaaattatgggcaaaccgtacgatcagctcaagatcattaccgttcacgtgggtaacggcgcatcagttgcggcggtgaagaatggcgtatctgttgacacttccatgggtttcacaccacttgaaggtcttgtcatgggcacgcgcagcggcgatattgatccggccatcgtggaatttcttgagaaagaagaaggattgtcggccaaagaagtcgtcagtatcctcaacaagaaatctggtgtgtatgggctcaccaaaggctttagtagtgacatgcgtgacattgaagataatgctattgaaggtgatcctgtatgccgccttgcattcgatgtgtacgaatatcgtatcgcgaaatatattggcgcatacgctgcggccatgaacggtgttgacgcgatcgtctttaccgcaggagttggcgaaaatagcccgattatgcgcgaagaaattattgagaactacttgggctacttagggatcaagatcgataaagaagccaatgacttcaaaggtgaggagaagatcatttcaacgcccgattccaaagtgattgcgatggtagttccgaccaacgaggagctcatgatcgccaaagacacgaaagaaatcattgagaaagggttggacgagcttaagatc

SEQ ID NO: 160 - protein, 417 aa, synthetic construct
  REGION 1..417: note = Variant of acetate kinase
MHHHHHHGGSGMKVLVINSGSSSIKYQLLDMTNEKVLAKGLVERIGIDGSRIVHKVNGEKHVLEHEIKNHEIGLKLVLDLLTDEKYGVLKDLKEIDAVGHRVVHGGERFASSVKITDEVLKTIETLSFLAPLHNPANIMGIKSSMKLLPGVPQVAVFDTAFHQKMPEKAYLYAIPYEYYEKYKIRRYGFHGTSHRYVSKRAAEIMGKPYDQLKIITVHVGNGASVAAVKNGVSVDTSMGFTPLEGLVMGTRSGDIDPAIVEFLEKEEGLSAKEVVSILNKKSGVYGLTKGFSSDMRDIEDNAIEGDPVCRLAFDVYEYRIAKYIGAYAAAMNGVDAIVFTAGVGENSPIMREEIIENYLGYLGIKIDKEANDFKGEEKIISTPDSKVIAMVVPTNEELMIAKDTKEIIEKGLDELKI

SEQ ID NO: 161 - DNA, 1251 bp, synthetic construct
  misc_feature 1..1251: note = Variant of acetate kinase
  source 1..1251: mol_type = other DNA
atgcaccatcatcatcatcatggcggtagcggcatgaaagttctggtgattaattctggtagctcctccatcaaatatcagctcctcgatatgaccaacgaaaaggtattagcgaaaggcttggtcgagcgcattggcatcgacggttcgcgtatcgtgcataaagttaacggcgaaaaacacgtgctggaacatgagattaagaatcacgaaattggacttaaattggtcctggatcttcttacggacgaaaaatacggtgtgttgaaggatctcaaagaaatcgatgcagttgggcatcgcgtagtacatggcggcgagcgttttgccagtagcgtgaagattactgacgaagtcttaaagaccatcgagacgttgtcgttcttagctccgttacacaatccagcgaacattatgggtatcaagagcagcgataaattattaccgggtgtgcctcaagttgccgtctttgatacagcgttccaccagaagatgccggagaaagcctatttgtacgcaatcccctatgagtactacgagaaatataaaattcgccgctatgggtttcatggaacctcacatcgttatgtgagtaaacgtgctgcggaaattatgggcaaaccgtacgatcagctcaagatcattaccgttcacgtgggtaacggcgcatcagttgcggcggtgaagaatggcgtatctgttgacacttccatgggtttcacaccacttgaaggtcttgtcatgggcacgcgcagcggcgatattgatccggccatcgtggaatttcttgagaaagaagaaggattgtcggccaaagaagtcgtcaacatcctcaacaagaaatctggtgtgtatgggctcaccaaaggctttagtagtgacatgcgtgacattgaagataatgctattgaaggtgatcctgtatgccgccttgcattcgatgtgtacgaatatcgtatcgcgaaatatattggcgcatacgctgcggccatgaacggtgttgacgcgatcgtctttaccgcaggagttggcgaaaatagcccgattatgcgcgaagaaattattgagaactacttgggctacttagggatcaagatcgataaagaagccaatgacttcaaaggtgaggagaagatcatttcaacgcccgattccaaagtgattgcgatggtagttccgaccaacgaggagctcatgatcgccaaagacacgaaagaaatcattgagaaagggttggacgagcttaagatc

SEQ ID NO: 162 - protein, 417 aa, synthetic construct
  REGION 1..417: note = Variant of acetate kinase
MHHHHHHGGSGMKVLVINSGSSSIKYQLLDMTNEKVLAKGLVERIGIDGSRIVHKVNGEKHVLEHEIKNHEIGLKLVLDLLTDEKYGVLKDLKEIDAVGHRVVHGGERFASSVKITDEVLKTIETLSFLAPLHNPANIMGIKSSDKLLPGVPQVAVFDTAFHQKMPEKAYLYAIPYEYYEKYKIRRYGFHGTSHRYVSKRAAEIMGKPYDQLKIITVHVGNGASVAAVKNGVSVDTSMGFTPLEGLVMGTRSGDIDPAIVEFLEKEEGLSAKEVVNILNKKSGVYGLTKGFSSDMRDIEDNAIEGDPVCRLAFDVYEYRIAKYIGAYAAAMNGVDAIVFTAGVGENSPIMREEIIENYLGYLGIKIDKEANDFKGEEKIISTPDSKVIAMVVPTNEELMIAKDTKEIIEKGLDELKI

SEQ ID NO: 163 - DNA, 1251 bp, synthetic construct
  misc_feature 1..1251: note = Variant of acetate kinase
  source 1..1251: mol_type = other DNA
atgcaccatcatcatcatcatggcggtagcggcatgaaagttctggtgattaattctggtagctcctccatcaaatatcagctcctcgatatgaccaacgaaaaggtattagcgaaaggcttggtcgagcgcattggcatcgacggttcgcgtatcgtgcataaagttaacggcgaaaaacacgtgctggaacatgagattaagaatcacgaaattggacttaaattggtcctggatcttcttacggacgaaaaatacggtgtgttgaaggatctcaaagaaatcgatgcagttgggcatcgcgtagtacatggcggcgagcgttttgccagtagcgtgaaggggactgacgaagtcttaaagaccatcgagacgttgtcgttcttagctccgttacacaatccagcgaacattatgggtatcaagagcagcatgaaattattaccgggtgtgcctcaagttgccgtctttgatacagcgttccaccagaagatgccggagaaagcctatttgtacgcaatcccctatgagtactacgagaaatataaaattcgccgctatgggtttcatggaacctcacatcgttatgtgagtaaacgtgctgcggaaattatgggcaaaccgtacgatcagctcaagatcattaccgttcacgtgggtaacggcgcatcagttgcggcggtgaagaatggcgtatctgttgacacttccatgggtttcacaccacttgaaggtcttgtcatgggcacgcgcagcggcgatattgatccggccatcgtggaatttcttgagaaagaagaaggattgtcggccaaagaagtcgtcaacatcctcaacaagaaatctggtgtgtatgggctcaccaaaggctttagtagtgacatgcgtgacattgaagataatgctattgaaggtgatcctgtatgccgccttgcattcgatgtgtacgaatatcgtatcgcgaaatatattggcgcatacgctgcggccatgaacggtgttgacgcgatcgtctttaccgcaggagttggcgaaaatagcccgattatgcgcgaagaaattattgagaactacttgggctacttagggatcaagatcgataaagaagccaatgacttcaaaggtgaggagaagatcatttcaacgcccgattccaaagtgattgcgatggtagttccgaccaacgaggagctcatgatcgccaaagacacgaaagaaatcattgagaaagggttggacgagcttaagatc

SEQ ID NO: 164 - protein, 417 aa, synthetic construct
  REGION 1..417: note = Variant of acetate kinase
MHHHHHHGGSGMKVLVINSGSSSIKYQLLDMTNEKVLAKGLVERIGIDGSRIVHKVNGEKHVLEHEIKNHEIGLKLVLDLLTDEKYGVLKDLKEIDAVGHRVVHGGERFASSVKGTDEVLKTIETLSFLAPLHNPANIMGIKSSMKLLPGVPQVAVFDTAFHQKMPEKAYLYAIPYEYYEKYKIRRYGFHGTSHRYVSKRAAEIMGKPYDQLKIITVHVGNGASVAAVKNGVSVDTSMGFTPLEGLVMGTRSGDIDPAIVEFLEKEEGLSAKEVVNILNKKSGVYGLTKGFSSDMRDIEDNAIEGDPVCRLAFDVYEYRIAKYIGAYAAAMNGVDAIVFTAGVGENSPIMREEIIENYLGYLGIKIDKEANDFKGEEKIISTPDSKVIAMVVPTNEELMIAKDTKEIIEKGLDELKI

SEQ ID NO: 165 - DNA, 1251 bp, synthetic construct
  misc_feature 1..1251: note = Variant of acetate kinase
  source 1..1251: mol_type = other DNA
atgcaccatcatcatcatcatggcggtagcggcatgaaagttctggtgattaattctggtagctcctccatcaaatatcagctcctcgatatgaccaacgaaaaggtattagcgaaaggcttggtcgagcgcattcagatcgacggttcgcgtatcgtgcataaagttaacggcgaaaaacacgtgctggaacatgagattaagaatcacgaaattggacttaaattggtcctggatcttcttacggacgaaaaatacggtgtgttgaaggatctcaaagaaatcgatgcagttgggcatcgcgtagtacatggcggcgagcgttttgccagtagcgtgaagattactgacgaagtcttaaagaccatcgagacgttgtcgttcttagctccgttacacaatccagcgaacattatgggtatcaagagcagcatgaaattattaccgggtgtgcctcaagttgccgtctttgatacagcgttccaccagaagatgccggagaaagcctatttgtacgcaatcccctatgagtactacgagaaatataaaattcgccgctatgggtttcatggaacctcacatcgttatgtgagtaaacgtgctgcggaaattatgggcaaaccgtacgatcagctcaagatcattaccgttcacgtgggtaacggcgcatcagttgcggcggtgaagaatggcgtatctgttgacacttccatgggtttcacaccacttgaaggtcttgtcatgggcacgcgcagcggcgatattgatccggccatcgtggaatttcttgagaaagaagaaggattgtcggccaaagaagtcgtcaacatcctcaacaagaaatctggtgtgtatgggctcaccaaaggctttagtagtgacatgcgtgacattgaagataatgctattgaaggtgatcctgtatgccgccttgcattcgatgtgtacgaatatcgtatcgcgaaatatattggcgcatacgctgcggccatgaacggtgttgacgcgatcgtctttaccgcaggagttggcgaaaatagcccgattatgcgcgaagaaattattgagaactacttgggctacttagggatcaagatcgataaagaagccaatgacttcaaaggtgaggagaagatcatttcaacgcccgattccaaagtgattgcgatggtagttccgaccaacgaggagctcatgatcgccaaagacacgaaagaaatcattgagaaagggttggacgagcttaagatc

SEQ ID NO: 166 - protein, 417 aa, synthetic construct
  REGION 1..417: note = Variant of acetate kinase
MHHHHHHGGSGMKVLVINSGSSSIKYQLLDMTNEKVLAKGLVERIQIDGSRIVHKVNGEKHVLEHEIKNHEIGLKLVLDLLTDEKYGVLKDLKEIDAVGHRVVHGGERFASSVKITDEVLKTIETLSFLAPLHNPANIMGIKSSMKLLPGVPQVAVFDTAFHQKMPEKAYLYAIPYEYYEKYKIRRYGFHGTSHRYVSKRAAEIMGKPYDQLKIITVHVGNGASVAAVKNGVSVDTSMGFTPLEGLVMGTRSGDIDPAIVEFLEKEEGLSAKEVVNILNKKSGVYGLTKGFSSDMRDIEDNAIEGDPVCRLAFDVYEYRIAKYIGAYAAAMNGVDAIVFTAGVGENSPIMREEIIENYLGYLGIKIDKEANDFKGEEKIISTPDSKVIAMVVPTNEELMIAKDTKEIIEKGLDELKI

SEQ ID NO: 167 - DNA, 1251 bp, synthetic construct
  misc_feature 1..1251: note = Variant of acetate kinase
  source 1..1251: mol_type = other DNA
atgcaccatcatcatcatcatggcggtagcggcatgaaagttctggtgattaattctggtagctcctccatcaaatatcagctcctcgatatgaccaacgaaaaggtattagcgaaaggcttggtcgagcgcattggcatcgacggttcgcgtatcgtgcataaagttaacggcgaaaaacacgtgctggaacatgagattaagaatcacgaaattggacttaaattggtcctggatcttcttacggacgaaaaatacggtgtgttgaaggatctcaaagaaatcgatgcagttgggcatcgcgtagtacatggcggcgagcgttttgccagtagcgtgaagattactgacgaagtcttaaagaccatcgagacgttgtcgttcttagctccgttacacaatccagcgaacattatgggtatcaagagcagcatgaaattattaccgggtgtgcctcaagttgccgtctttgatacagcgttccaccagaagatgccggagaaagcctatttgtacgcaatcccctatgagtactacgagaaatataaaattcgccgctatgggtttcatggaacctcacatcgttatgtgagtaaacgtgctgcggaaattctgggcaaaccgtacgatcagctcaagatcattaccgttcacgtgggtaacggcgcatcagttgcggcggtgaagaatggcgtatctgttgacacttccatgggtttcacaccacttgaaggtcttgtcatgggcacgcgcagcggcgatattgatccggccatcgtggaatttcttgagaaagaagaaggattgtcggccaaagaagtcgtcaacatcctcaacaagaaatctggtgtgtatgggctcaccaaaggctttagtagtgacatgcgtgacattgaagataatgctattgaaggtgatcctgtatgccgccttgcattcgatgtgtacgaatatcgtatcgcgaaatatattggcgcatacgctgcggccatgaacggtgttgacgcgatcgtctttaccgcaggagttggcgaaaatagcccgattatgcgcgaagaaattattgagaactacttgggctacttagggatcaagatcgataaagaagccaatgacttcaaaggtgaggagaagatcatttcaacgcccgattccaaagtgattgcgatggtagttccgaccaacgaggagctcatgatcgccaaagacacgaaagaaatcattgagaaagggttggacgagcttaagatc

SEQ ID NO: 168 - protein, 417 aa, synthetic construct
  REGION 1..417: note = Variant of acetate kinase
MHHHHHHGGSGMKVLVINSGSSSIKYQLLDMTNEKVLAKGLVERIGIDGSRIVHKVNGEKHVLEHEIKNHEIGLKLVLDLLTDEKYGVLKDLKEIDAVGHRVVHGGERFASSVKITDEVLKTIETLSFLAPLHNPANIMGIKSSMKLLPGVPQVAVFDTAFHQKMPEKAYLYAIPYEYYEKYKIRRYGFHGTSHRYVSKRAAEILGKPYDQLKIITVHVGNGASVAAVKNGVSVDTSMGFTPLEGLVMGTRSGDIDPAIVEFLEKEEGLSAKEVVNILNKKSGVYGLTKGFSSDMRDIEDNAIEGDPVCRLAFDVYEYRIAKYIGAYAAAMNGVDAIVFTAGVGENSPIMREEIIENYLGYLGIKIDKEANDFKGEEKIISTPDSKVIAMVVPTNEELMIAKDTKEIIEKGLDELKI

SEQ ID NO: 169 - DNA, 1251 bp, synthetic construct
  misc_feature 1..1251: note = Variant of acetate kinase
  source 1..1251: mol_type = other DNA
atgcaccatcatcatcatcatggcggtagcggcatgaaagttctggtgattaattctggtagctcctccatcaaatatcagctcctcgatatgaccaacgaaaaggtattagcgaaaggcttggtcgagcgcattggcatcgacggttcgcgtatcgtgcataaagttaacggcgaaaaacacgtgctggaacatgagattaagaatcacgaaattggacttaaattgcatctggatcttcttacggacgaaaaatacggtgtgttgaaggatctcaaagaaatcgatgcagttgggcatcgcgtagtacatggcggcgagcgttttgccagtagcgtgaagattactgacgaagtcttaaagaccatcgagacgttgtcgttcttagctccgttacacaatccagcgaacattatgggtatcaagagcagcatgaaattattaccgggtgtgcctcaagttgccgtctttgatacagcgttccaccagaagatgccggagaaagcctatttgtacgcaatcccctatgagtactacgagaaatataaaattcgccgctatgggtttcatggaacctcacatcgttatgtgagtaaacgtgctgcggaaattatgggcaaaccgtacgatcagctcaagatcattaccgttcacgtgggtaacggcgcatcagttgcggcggtgaagaatggcgtatctgttgacacttccatgggtttcacaccacttgaaggtcttgtcatgggcacgcgcagcggcgatattgatccggccatcgtggaatttcttgagaaagaagaaggattgtcggccaaagaagtcgtcaacatcctcaacaagaaatctggtgtgtatgggctcaccaaaggctttagtagtgacatgcgtgacattgaagataatgctattgaaggtgatcctgtatgccgccttgcattcgatgtgtacgaatatcgtatcgcgaaatatattggcgcatacgctgcggccatgaacggtgttgacgcgatcgtctttaccgcaggagttggcgaaaatagcccgattatgcgcgaagaaattattgagaactacttgggctacttagggatcaagatcgataaagaagccaatgacttcaaaggtgaggagaagatcatttcaacgcccgattccaaagtgattgcgatggtagttccgaccaacgaggagctcatgatcgccaaagacacgaaagaaatcattgagaaagggttggacgagcttaagatc

SEQ ID NO: 170 - protein, 417 aa, synthetic construct
  REGION 1..417: note = Variant of acetate kinase
MHHHHHHGGSGMKVLVINSGSSSIKYQLLDMTNEKVLAKGLVERIGIDGSRIVHKVNGEKHVLEHEIKNHEIGLKLHLDLLTDEKYGVLKDLKEIDAVGHRVVHGGERFASSVKITDEVLKTIETLSFLAPLHNPANIMGIKSSMKLLPGVPQVAVFDTAFHQKMPEKAYLYAIPYEYYEKYKIRRYGFHGTSHRYVSKRAAEIMGKPYDQLKIITVHVGNGASVAAVKNGVSVDTSMGFTPLEGLVMGTRSGDIDPAIVEFLEKEEGLSAKEVVNILNKKSGVYGLTKGFSSDMRDIEDNAIEGDPVCRLAFDVYEYRIAKYIGAYAAAMNGVDAIVFTAGVGENSPIMREEIIENYLGYLGIKIDKEANDFKGEEKIISTPDSKVIAMVVPTNEELMIAKDTKEIIEKGLDELKI

SEQ ID NO: 171 - DNA, 1251 bp, synthetic construct
  misc_feature 1..1251: note = Variant of acetate kinase
  source 1..1251: mol_type = other DNA
atgcaccatcatcatcatcatggcggtagcggcatgaaagttctggtgattaattctggtagctcctccatcaaatatcagctcctcgatatgaccaacgaaaaggtattagcgaaaggcttggtcgagcgcattggcatcgacggttcgcgtatcgtgcataaagttaacggcgaaaaacacgtgctggaacatgagattaagaatcacgaaattggacttaaattggtcctggatcttcttacggacgaaaaatacggtgtgttgaaggatctcaaagaaatcgatgcagttgggcatcgcgtagtacatggcggcgagcgttttgccagtagcgtgaagattactgacgaagtcttaaagaccatcgagacgttgtcgttcttagctccgttacacaatccagcgaacattatgggttggaagagcagcatgaaattattaccgggtgtgcctcaagttgccgtctttgatacagcgttccaccagaagatgccggagaaagcctatttgtacgcaatcccctatgagtactacgagaaatataaaattcgccgctatgggtttcatggaacctcacatcgttatgtgagtaaacgtgctgcggaaattatgggcaaaccgtacgatcagctcaagatcattaccgttcacgtgggtaacggcgcatcagttgcggcggtgaagaatggcgtatctgttgacacttccatgggtttcacaccacttgaaggtcttgtcatgggcacgcgcagcggcgatattgatccggccatcgtggaatttcttgagaaagaagaaggattgtcggccaaagaagtcgtcaacatcctcaacaagaaatctggtgtgtatgggctcaccaaaggctttagtagtgacatgcgtgacattgaagataatgctattgaaggtgatcctgtatgccgccttgcattcgatgtgtacgaatatcgtatcgcgaaatatattggcgcatacgctgcggccatgaacggtgttgacgcgatcgtctttaccgcaggagttggcgaaaatagcccgattatgcgcgaagaaattattgagaactacttgggctacttagggatcaagatcgataaagaagccaatgacttcaaaggtgaggagaagatcatttcaacgcccgattccaaagtgattgcgatggtagttccgaccaacgaggagctcatgatcgccaaagacacgaaagaaatcattgagaaagggttggacgagcttaagatc

SEQ ID NO: 172 - protein, 417 aa, synthetic construct
  REGION 1..417: note = Variant of acetate kinase
MHHHHHHGGSGMKVLVINSGSSSIKYQLLDMTNEKVLAKGLVERIGIDGSRIVHKVNGEKHVLEHEIKNHEIGLKLVLDLLTDEKYGVLKDLKEIDAVGHRVVHGGERFASSVKITDEVLKTIETLSFLAPLHNPANIMGWKSSMKLLPGVPQVAVFDTAFHQKMPEKAYLYAIPYEYYEKYKIRRYGFHGTSHRYVSKRAAEIMGKPYDQLKIITVHVGNGASVAAVKNGVSVDTSMGFTPLEGLVMGTRSGDIDPAIVEFLEKEEGLSAKEVVNILNKKSGVYGLTKGFSSDMRDIEDNAIEGDPVCRLAFDVYEYRIAKYIGAYAAAMNGVDAIVFTAGVGENSPIMREEIIENYLGYLGIKIDKEANDFKGEEKIISTPDSKVIAMVVPTNEELMIAKDTKEIIEKGLDELKI

SEQ ID NO: 173 - DNA, 1251 bp, synthetic construct
  misc_feature 1..1251: note = Variant of acetate kinase
  source 1..1251: mol_type = other DNA
atgcaccatcatcatcatcatggcggtagcggcatgaaagttctggtgattaattctggtagctcctccatcaaatatcagctcctcgatatgaccaacgaaaaggtattagcgaaaggcttggtcgagcgcattggcatcgacggttcgcgtatcgtgcataaagttaacggcgaaaaacacgtgctggaacatgagattaagaatcacgaaattggacttaaattggtcctggatcttcttacggacgaaaaatacggtgtgttgaaggatctcaaagaaatcgatgcagttgggcatcgcgtagtacatggcggcgagcgttttgccagtagcgtgaagcagactgacgaagtcttaaagaccatcgagacgttgtcgttcttagctccgttacacaatccagcgaacattatgggtatcaagagcagcatgaaattattaccgggtgtgcctcaagttgccgtctttgatacagcgttccaccagaagatgccggagaaagcctatttgtacgcaatcccctatgagtactacgagaaatataaaattcgccgctatgggtttcatggaacctcacatcgttatgtgagtaaacgtgctgcggaaattatgggcaaaccgtacgatcagctcaagatcattaccgttcacgtgggtaacggcgcatcagttgcggcggtgaagaatggcgtatctgttgacacttccatgggtttcacaccacttgaaggtcttgtcatgggcacgcgcagcggcgatattgatccggccatcgtggaatttcttgagaaagaagaaggattgtcggccaaagaagtcgtcaacatcctcaacaagaaatctggtgtgtatgggctcaccaaaggctttagtagtgacatgcgtgacattgaagataatgctattgaaggtgatcctgtatgccgccttgcattcgatgtgtacgaatatcgtatcgcgaaatatattggcgcatacgctgcggccatgaacggtgttgacgcgatcgtctttaccgcaggagttggcgaaaatagcccgattatgcgcgaagaaattattgagaactacttgggctacttagggatcaagatcgataaagaagccaatgacttcaaaggtgaggagaagatcatttcaacgcccgattccaaagtgattgcgatggtagttccgaccaacgaggagctcatgatcgccaaagacacgaaagaaatcattgagaaagggttggacgagcttaagatc

SEQ ID NO: 174 - protein, 417 aa, synthetic construct
  REGION 1..417: note = Variant of acetate kinase
MHHHHHHGGSGMKVLVINSGSSSIKYQLLDMTNEKVLAKGLVERIGIDGSRIVHKVNGEKHVLEHEIKNHEIGLKLVLDLLTDEKYGVLKDLKEIDAVGHRVVHGGERFASSVKQTDEVLKTIETLSFLAPLHNPANIMGIKSSMKLLPGVPQVAVFDTAFHQKMPEKAYLYAIPYEYYEKYKIRRYGFHGTSHRYVSKRAAEIMGKPYDQLKIITVHVGNGASVAAVKNGVSVDTSMGFTPLEGLVMGTRSGDIDPAIVEFLEKEEGLSAKEVVNILNKKSGVYGLTKGFSSDMRDIEDNAIEGDPVCRLAFDVYEYRIAKYIGAYAAAMNGVDAIVFTAGVGENSPIMREEIIENYLGYLGIKIDKEANDFKGEEKIISTPDSKVIAMVVPTNEELMIAKDTKEIIEKGLDELKI

SEQ ID NO: 175 - DNA, 1251 bp, synthetic construct
  misc_feature 1..1251: note = Variant of acetate kinase
  source 1..1251: mol_type = other DNA
atgcaccatcatcatcatcatggcggtagcggcatgaaagttctggtgattaattctggtagctcctccatcaaatatcagctcctcgatatgaccaacgaaaaggtattagcgaaaggcttggtcgagcgcattggcatcgacggttcgcgtatcgtgcataaagttaacggcgaaaaacacgtgctggaacatgagattaagaatcacgaaattggacttaaattggtcctggatcttcttacggacgaaaaatacggtgtgttgaaggatctcaaagaaatcgatgcagttgggcatcgcgtagtacatggcggcgagcgttttgccagtagcgtgaagattactgacgaagtcttaaagaccatcgagacgttgtcgttcttagctccgttacacaatccagcgaacattatgggtatcaagagcagcatgaaattattaccgggtgtgcctcaagttgccaagtttgatacagcgttccaccagaagatgccggagaaagcctatttgtacgcaatcccctatgagtactacgagaaatataaaattcgccgctatgggtttcatggaacctcacatcgttatgtgagtaaacgtgctgcggaaattatgggcaaaccgtacgatcagctcaagatcattaccgttcacgtgggtaacggcgcatcagttgcggcggtgaagaatggcgtatctgttgacacttccatgggtttcacaccacttgaaggtcttgtcatgggcacgcgcagcggcgatattgatccggccatcgtggaatttcttgagaaagaagaaggattgtcggccaaagaagtcgtcaacatcctcaacaagaaatctggtgtgtatgggctcaccaaaggctttagtagtgacatgcgtgacattgaagataatgctattgaaggtgatcctgtatgccgccttgcattcgatgtgtacgaatatcgtatcgcgaaatatattggcgcatacgctgcggccatgaacggtgttgacgcgatcgtctttaccgcaggagttggcgaaaatagcccgattatgcgcgaagaaattattgagaactacttgggctacttagggatcaagatcgataaagaagccaatgacttcaaaggtgaggagaagatcatttcaacgcccgattccaaagtgattgcgatggtagttccgaccaacgaggagctcatgatcgccaaagacacgaaagaaatcattgagaaagggttggacgagcttaagatc

SEQ ID NO: 176 - protein, 417 aa, synthetic construct
  REGION 1..417: note = Variant of acetate kinase
MHHHHHHGGSGMKVLVINSGSSSIKYQLLDMTNEKVLAKGLVERIGIDGSRIVHKVNGEKHVLEHEIKNHEIGLKLVLDLLTDEKYGVLKDLKEIDAVGHRVVHGGERFASSVKITDEVLKTIETLSFLAPLHNPANIMGIKSSMKLLPGVPQVAKFDTAFHQKMPEKAYLYAIPYEYYEKYKIRRYGFHGTSHRYVSKRAAEIMGKPYDQLKIITVHVGNGASVAAVKNGVSVDTSMGFTPLEGLVMGTRSGDIDPAIVEFLEKEEGLSAKEVVNILNKKSGVYGLTKGFSSDMRDIEDNAIEGDPVCRLAFDVYEYRIAKYIGAYAAAMNGVDAIVFTAGVGENSPIMREEIIENYLGYLGIKIDKEANDFKGEEKIISTPDSKVIAMVVPTNEELMIAKDTKEIIEKGLDELKI

SEQ ID NO: 177 - DNA, 1251 bp, synthetic construct
  misc_feature 1..1251: note = Variant of acetate kinase
  source 1..1251: mol_type = other DNA
atgcaccatcatcatcatcatggcggtagcggcatgaaagttctggtgattaattctggtagctcctccatcaaatatcagctcctcgatatgaccaacgaaaaggtattagcgaaaggcttggtcgagcgcattggcatcgacggttcgcgtatcgtgcataaagttaacggcgaaaaacacgtgctggaacatgagattaagaatcacgaaattggacttaaattggtcctggatcttcttacggacgaaaaatacggtgtgttgaaggatctcaaagaaatcgatgcagttgggcatcgcgtagtacatggcggcgagcgttttgccagtagcgtgaagattactgacgaagtcttaaagaccatcgagacgttgtcgttcttagctccgttacacaatccagcgaacattatgggtatcaagagcagcatgaaattattaccgggtgtgcctcaagttgccgtctttgatacagcgttccaccagaagatgccggagaaagcctatttgtacgcaatcccctatgagtactacgagaaatataaaattcgccgctatgggtttcatggaacctcacatcgttatgtgagtaaacgtgctgcggaaattatgggcaaaccgtacgatcagctcaagatcattaccgttcacgtgggtaacggcgcatcagttgcggcggtgaagaatggcgtatctgttgacacttccatgggtttcacaccacttgaaggtcttgtcatgggcacgcgcagcggcgatattgatccggccatcgtggaatttcttgagaaagaagaaggattgtcggccaaagaagtcgtcaacatcctcaacaagaaatctggtgtgtatgggctcaccaaaggctttagtagtgacatgcgtgacattgaagataatgctattgaaggtgatcctgtatgccgccttgcattcgatgtgtacgaatatcgtatcgcgaaatatattggcgcatacgctgcggccatgaacggtgttgacgcgatcgtctttaccgcaggagttggcgaaaatagcagtattatgcgcgaagaaattattgagaactacttgggctacttagggatcaagatcgataaagaagccaatgacttcaaaggtgaggagaagatcatttcaacgcccgattccaaagtgattgcgatggtagttccgaccaacgaggagctcatgatcgccaaagacacgaaagaaatcattgagaaagggttggacgagcttaagatc

SEQ ID NO: 178 - protein, 417 aa, synthetic construct
  REGION 1..417: note = Variant of acetate kinase
MHHHHHHGGSGMKVLVINSGSSSIKYQLLDMTNEKVLAKGLVERIGIDGSRIVHKVNGEKHVLEHEIKNHEIGLKLVLDLLTDEKYGVLKDLKEIDAVGHRVVHGGERFASSVKITDEVLKTIETLSFLAPLHNPANIMGIKSSMKLLPGVPQVAVFDTAFHQKMPEKAYLYAIPYEYYEKYKIRRYGFHGTSHRYVSKRAAEIMGKPYDQLKIITVHVGNGASVAAVKNGVSVDTSMGFTPLEGLVMGTRSGDIDPAIVEFLEKEEGLSAKEVVNILNKKSGVYGLTKGFSSDMRDIEDNAIEGDPVCRLAFDVYEYRIAKYIGAYAAAMNGVDAIVFTAGVGENSSIMREEIIENYLGYLGIKIDKEANDFKGEEKIISTPDSKVIAMVVPTNEELMIAKDTKEIIEKGLDELKI

SEQ ID NO: 179 - DNA, 1251 bp, synthetic construct
  misc_feature 1..1251: note = Variant of acetate kinase
  source 1..1251: mol_type = other DNA
atgcaccatcatcatcatcatggcggtagcggcatgaaagttctggtgattaattctggtagctcctccatcaaatatcagctcctcgatatgaccaacgaaaaggtattagcgaaaggcttggtcgagcgcattggcatcgacggttcgcgtatcgtgcataaagttaacggcgaaaaacacgtgctggaacatgagattaagaatcacgaaattggacttaaattggtcctggatcttcttacggacgaaaaatacggtgtgttgaaggatctcaaagaaatcgatgcagttgggcatcgcgtagtacatggcggcgagcgttttgccagtagcgtgaagattactgacgaagtcttaaagaccatcgagacgttgtcgttcttagctccgttacacaatccagcgaacattatgggtatcaagagcagcatgaaattattaccgggtgtgcctcaagttgccgtctttgatacagcgttccaccagaagatgccggagaaagcctatttgtacgcaatcccctatgagtactacgagaaatataaaattcgccgctatgggtttcatggaacctcacatcgttatgtgagtaaacgtgctgcggaaattatgggcaaaccgtacgatcagctcaagatcattaccgttcacgtgggtaacggcgcatcagttgcggcggtgaagaatggcgtatctgttgacacttccatgggtttcacaccacttgaaggtcttgtcatgggcacgcgcagcggcgatattgatccggccatcgtggaatttcttgagaaagaagaaggattgtcggccaaagaagtcgtcaacatcctcaacaagaaatctggtgtgtatgggctcaccaaaggctttagtagtgacatgcgtgacattgaagataatgctattgaaggtgatcctgtatgccgccttgcactggatgtgtacgaatatcgtatcgcgaaatatattggcgcatacgctgcggccatgaacggtgttgacgcgatcgtctttaccgcaggagttggcgaaaatagcccgattatgcgcgaagaaattattgagaactacttgggctacttagggatcaagatcgataaagaagccaatgacttcaaaggtgaggagaagatcatttcaacgcccgattccaaagtgattgcgatggtagttccgaccaacgaggagctcatgatcgccaaagacacgaaagaaatcattgagaaagggttggacgagcttaagatc

SEQ ID NO: 180 - protein, 417 aa, synthetic construct
  REGION 1..417: note = Variant of acetate kinase
MHHHHHHGGSGMKVLVINSGSSSIKYQLLDMTNEKVLAKGLVERIGIDGSRIVHKVNGEKHVLEHEIKNHEIGLKLVLDLLTDEKYGVLKDLKEIDAVGHRVVHGGERFASSVKITDEVLKTIETLSFLAPLHNPANIMGIKSSMKLLPGVPQVAVFDTAFHQKMPEKAYLYAIPYEYYEKYKIRRYGFHGTSHRYVSKRAAEIMGKPYDQLKIITVHVGNGASVAAVKNGVSVDTSMGFTPLEGLVMGTRSGDIDPAIVEFLEKEEGLSAKEVVNILNKKSGVYGLTKGFSSDMRDIEDNAIEGDPVCRLALDVYEYRIAKYIGAYAAAMNGVDAIVFTAGVGENSPIMREEIIENYLGYLGIKIDKEANDFKGEEKIISTPDSKVIAMVVPTNEELMIAKDTKEIIEKGLDELKI

SEQ ID NO: 181 - DNA, 1251 bp, synthetic construct
  misc_feature 1..1251: note = Variant of acetate kinase
  source 1..1251: mol_type = other DNA
atgcaccatcatcatcatcatggcggtagcggcatgaaagttctggtgattaattctggtagctcctccatcaaatatcagctcctcgatatgaccaacgaaaaggtattagcgaaaggcttggtcgagcgcattggcatcgacggttcgcgtatcgtgcataaagttaacggcgaaaaacacgtgctggaacatgagattaagaatcacgaaattggacttaaattggtcctggatcttcttacggacgaaaaatacggtgtgttgaaggatctcaaagaaatcgatgcagttgggcatcgcgtagtacatggcggcgagcgttttgccagtagcgtgaagattactgacgaagtcttaaagaccatcgagacgttgtcgttcttagctccgttacacaatccagcgaacattatgggtatcaagagcagcatgaaattattaccgggtgtgcctcaagttgccgtctttgatacagcgttccaccagaagatgccggagaaagcctatttgtacgcaatcccctatgagtactacgagaaatataaaattcgccgctatgggtttcatggaacctcacatcgttatgtgagtaaacgtgctgcggaaattatgggcaaaccgtacgatcagctcaagatcattaccgttcacgtgggtaacggcgcatcagttgcggcggtgaagaatggcgtatctgttgacacttccatgggtttcacaccacttgaaggtcttgtcatgggcacgcgcagcggcgatattgatccggccatcgtggaatttcttgagaaagaagaaggattgtcggccaaagaagtcgtcaacatcctcaacaagaaatctggtgtgtatgggctcaccaaaggctttagtagtgacatgcgtgacattgaagataatgctattgaaggtgatcctgtatgccgccttgcattcgatgtgtacgaatatcgtatcgcgaaatatattggcgcatacgctgcggccatgaacggtgttgacgcgatcgtctttaccgcaggagttggcgaaaatagccgtattatgcgcgaagaaattattgagaactacttgggctacttagggatcaagatcgataaagaagccaatgacttcaaaggtgaggagaagatcatttcaacgcccgattccaaagtgattgcgatggtagttccgaccaacgaggagctcatgatcgccaaagacacgaaagaaatcattgagaaagggttggacgagcttaagatc

SEQ ID NO: 182 - protein, 417 aa, synthetic construct
  REGION 1..417: note = Variant of acetate kinase
MHHHHHHGGSGMKVLVINSGSSSIKYQLLDMTNEKVLAKGLVERIGIDGSRIVHKVNGEKHVLEHEIKNHEIGLKLVLDLLTDEKYGVLKDLKEIDAVGHRVVHGGERFASSVKITDEVLKTIETLSFLAPLHNPANIMGIKSSMKLLPGVPQVAVFDTAFHQKMPEKAYLYAIPYEYYEKYKIRRYGFHGTSHRYVSKRAAEIMGKPYDQLKIITVHVGNGASVAAVKNGVSVDTSMGFTPLEGLVMGTRSGDIDPAIVEFLEKEEGLSAKEVVNILNKKSGVYGLTKGFSSDMRDIEDNAIEGDPVCRLAFDVYEYRIAKYIGAYAAAMNGVDAIVFTAGVGENSRIMREEIIENYLGYLGIKIDKEANDFKGEEKIISTPDSKVIAMVVPTNEELMIAKDTKEIIEKGLDELKI

SEQ ID NO: 183 - DNA, 1251 bp, synthetic construct
  misc_feature 1..1251: note = Variant of acetate kinase
  source 1..1251: mol_type = other DNA
atgcaccatcatcatcatcatggcggtagcggcatgaaagttctggtgattaattctggtagctcctccatcaaatatcagctcctcgatatgaccaacgaaaaggtattagcgaaaggcttggtcgagcgcattggcatcgacggttcgcgtatcgtgcataaagttaacggcgaaaaacacgtgctggaacatgagattaagaatcacgaaattggacttaaattggtcctggatcttcttacggacgaaaaatacggtgtgttgaaggatctcaaagaaatcgatgcagttgggcatcgcgtagtacatggcggcgagcgttttgccagtagcgtgaagattactgacgaagtcttaaagaccatcgagacgttgtcgttcttagctccgttacacaatccagcgaacattatgggtatcaagagcagcatgaaattattaccgggtgtgcctcaagttgccgtctttgatacagcgttccaccagaagatgccggagaaagcctatttgtacgcaatcccctatgagtactacgagaaatataaaattcgccgctatgggtttcatggaacctcacatcgttatgtgagtaaacgtgctgcggaaattatgggcaaaccgtacgatcagctcaagatcattaccgttcacgtgggtaacggcgcatcagttgcggcggtgaagaatggcgtatctgttgacacttccatgggtttcacaccacttgaaggtcttgtcatgggcacgcgcagcggcgatattgatccggccatcgtggaatttcttgagaaagaagaaggattgtcggccaaagaagtcgtcaacatcctcaacaagaaatctggtgtgtatgggctcaccaaaggctttagtagtgacatgcgtgacattgaagataatgctattgaaggtgatcctgtatgccgccttgcattcgatgtgtacgaatatcgtatcgcgaaatatattggcgcatacgctgcggccatgaacggtgttgacgcgatcgtctttaccgcaggagttggcgaaaatagcccgattatgcgcgaagaaattattgagaactacttgggctacttagggatcaagatcgataaagaagccaataggttcaaaggtgaggagaagatcatttcaacgcccgattccaaagtgattgcgatggtagttccgaccaacgaggagctcatgatcgccaaagacacgaaagaaatcattgagaaagggttggacgagcttaagatc

SEQ ID NO: 184 - protein, 417 aa, synthetic construct
  REGION 1..417: note = Variant of acetate kinase
MHHHHHHGGSGMKVLVINSGSSSIKYQLLDMTNEKVLAKGLVERIGIDGSRIVHKVNGEKHVLEHEIKNHEIGLKLVLDLLTDEKYGVLKDLKEIDAVGHRVVHGGERFASSVKITDEVLKTIETLSFLAPLHNPANIMGIKSSMKLLPGVPQVAVFDTAFHQKMPEKAYLYAIPYEYYEKYKIRRYGFHGTSHRYVSKRAAEIMGKPYDQLKIITVHVGNGASVAAVKNGVSVDTSMGFTPLEGLVMGTRSGDIDPAIVEFLEKEEGLSAKEVVNILNKKSGVYGLTKGFSSDMRDIEDNAIEGDPVCRLAFDVYEYRIAKYIGAYAAAMNGVDAIVFTAGVGENSPIMREEIIENYLGYLGIKIDKEANRFKGEEKIISTPDSKVIAMVVPTNEELMIAKDTKEIIEKGLDELKI

SEQ ID NO: 185 - DNA, 1251 bp, synthetic construct
  misc_feature 1..1251: note = Variant of acetate kinase
  source 1..1251: mol_type = other DNA
atgcaccatcatcatcatcatggcggtagcggcatgaaagttctggtgattaattctggtagctcctccatcaaatatcagctcctcgatatgaccaacgaaaaggtattagcgaaaggcttggtcgagcgcattggcatcgacggttcgcgtatcgtgcataaagttaacggcgaaaaacacgtgctggaacatgagattaagaatcacgaaattggacttaaattggtcctggatcttcttacggacgaaaaatacggtgtgttgaaggatctcaaagaaatcgatgcagttgggcatcgcgtagtacatggcggcgagcgttttgccagtagcgtgaagattactgacgaagtcttaaagaccatcgagacgttgtcgttcttagctccgttacacaatccagcgaacattatgggtatcaagagcagcatgaaatgtttaccgggtgtgcctcaagttgccgtctttgatacagcgttccaccagaagatgccggagaaagcctatttgtacgcaatcccctatgagtactacgagaaatataaaattcgccgctatgggtttcatggaacctcacatcgttatgtgagtaaacgtgctgcggaaattatgggcaaaccgtacgatcagctcaagatcattaccgttcacgtgggtaacggcgcatcagttgcggcggtgaagaatggcgtatctgttgacacttccatgggtttcacaccacttgaaggtcttgtcatgggcacgcgcagcggcgatattgatccggccatcgtggaatttcttgagaaagaagaaggattgtcggccaaagaagtcgtcaacatcctcaacaagaaatctggtgtgtatgggctcaccaaaggctttagtagtgacatgcgtgacattgaagataatgctattgaaggtgatcctgtatgccgccttgcattcgatgtgtacgaatatcgtatcgcgaaatatattggcgcatacgctgcggccatgaacggtgttgacgcgatcgtctttaccgcaggagttggcgaaaatagcccgattatgcgcgaagaaattattgagaactacttgggctacttagggatcaagatcgataaagaagccaatgacttcaaaggtgaggagaagatcatttcaacgcccgattccaaagtgattgcgatggtagttccgaccaacgaggagctcatgatcgccaaagacacgaaagaaatcattgagaaagggttggacgagcttaagatc

SEQ ID NO: 186 - protein, 417 aa, synthetic construct
  REGION 1..417: note = Variant of acetate kinase
MHHHHHHGGSGMKVLVINSGSSSIKYQLLDMTNEKVLAKGLVERIGIDGSRIVHKVNGEKHVLEHEIKNHEIGLKLVLDLLTDEKYGVLKDLKEIDAVGHRVVHGGERFASSVKITDEVLKTIETLSFLAPLHNPANIMGIKSSMKCLPGVPQVAVFDTAFHQKMPEKAYLYAIPYEYYEKYKIRRYGFHGTSHRYVSKRAAEIMGKPYDQLKIITVHVGNGASVAAVKNGVSVDTSMGFTPLEGLVMGTRSGDIDPAIVEFLEKEEGLSAKEVVNILNKKSGVYGLTKGFSSDMRDIEDNAIEGDPVCRLAFDVYEYRIAKYIGAYAAAMNGVDAIVFTAGVGENSPIMREEIIENYLGYLGIKIDKEANDFKGEEKIISTPDSKVIAMVVPTNEELMIAKDTKEIIEKGLDELKI

SEQ ID NO: 187 - DNA, 1251 bp, synthetic construct
  misc_feature 1..1251: note = Variant of acetate kinase
  source 1..1251: mol_type = other DNA
atgcaccatcatcatcatcatggcggtagcggcatgaaagttctggtgattaattctggtagctcctccatcaaatatcagctcctcgatatgaccaacgaaaaggtattagcgaaaggcttggtcgagcgcattggcatcgacggttcgcgtatcgtgcataaagttaacggcgaaaaacacgtgctggaacatgagattaagaatcacgaaattggacttaaattggtcctggatcttcttacggacgaaaaatacggtgtgttgaaggatctcaaagaaatcgatgcagttgggcatcgcgtagtacatggcggcgagcgttttgccagtagcgtgaagattactgacgaagtcttaaagaccatcgagacgttgtcgttcttagctccgttacacaatccagcgaacattatgggtatcaagagcagcatgaaattattaccgggtgtgcctcaagttgccgtctttgatacagcgttccaccagaagatgccggagaaagcctatttgtacgcaatcccctatgagtactacgagaaatataaaattcgccgctatgggtttcatggaacctcacatcgttatgtgagtaaacgtgctgcggaaattatgggcaaaccgtacgatcagctcaagatcattaccgttcacgtgggtaacggcgcatcagttgcggcggtgaagaatggcgtatctgttgacacttccatgggtttcacaccacttgaaggtcttgtcatgggcacgcgcagcggcgatattgatccggccatcgtggaatttcttgagaaagaagaaggattgtcggccaaagaagtcgtcaacatcctcaacaagaaatctggtgtgtatgggctcaccaaaggctttagtagtgacatgcgtgacattgaagataatgctattgaaggtgatcctgtatgccgccttgcattcgatgtgtacgaatatcgtatcgcgaaatatattggcgcatacgctgcggccatgaacggtgttgacgcgatcgtctttaccgcaggagttggcgaaaatagcccgattatgcgccatgaaattattgagaactacttgggctacttagggatcaagatcgataaagaagccaatgacttcaaaggtgaggagaagatcatttcaacgcccgattccaaagtgattgcgatggtagttccgaccaacgaggagctcatgatcgccaaagacacgaaagaaatcattgagaaagggttggacgagcttaagatc

SEQ ID NO: 188 - protein, 417 aa, synthetic construct
  REGION 1..417: note = Variant of acetate kinase
MHHHHHHGGSGMKVLVINSGSSSIKYQLLDMTNEKVLAKGLVERIGIDGSRIVHKVNGEKHVLEHEIKNHEIGLKLVLDLLTDEKYGVLKDLKEIDAVGHRVVHGGERFASSVKITDEVLKTIETLSFLAPLHNPANIMGIKSSMKLLPGVPQVAVFDTAFHQKMPEKAYLYAIPYEYYEKYKIRRYGFHGTSHRYVSKRAAEIMGKPYDQLKIITVHVGNGASVAAVKNGVSVDTSMGFTPLEGLVMGTRSGDIDPAIVEFLEKEEGLSAKEVVNILNKKSGVYGLTKGFSSDMRDIEDNAIEGDPVCRLAFDVYEYRIAKYIGAYAAAMNGVDAIVFTAGVGENSPIMRHEIIENYLGYLGIKIDKEANDFKGEEKIISTPDSKVIAMVVPTNEELMIAKDTKEIIEKGLDELKI

SEQ ID NO: 189 - DNA, 1251 bp, synthetic construct
  misc_feature 1..1251: note = Variant of acetate kinase
  source 1..1251: mol_type = other DNA
atgcaccatcatcatcatcatggcggtagcggcatgaaagttctggtgattaattctggtagctcctccatcaaatatcagctcctcgatatgaccaacgaaaaggtattagcgaaaggcttggtcgagcgcattggcatcgacggttcgcgtatcgtgcataaagttaacggcgaaaaacacgtgctggaacatgagattaagaatcacgaaattggacttaaattggtcctggatcttcttacggacgaaaaatacggtgtgttgaaggatctcaaagaaatcgatgcagttgggcatcgcgtagtacatggcggcgagcgttttgccagtagcgtgaagattactgacgaagtcttaaagaccatcgagacgttgtcgttcttagctccgttacacaatccacttaacattatgggtatcaagagcagcatgaaattattaccgggtgtgcctcaagttgccgtctttgatacagcgttccaccagaagatgccggagaaagcctatttgtacgcaatcccctatgagtactacgagaaatataaaattcgccgctatgggtttcatggaacctcacatcgttatgtgagtaaacgtgctgcggaaattatgggcaaaccgtacgatcagctcaagatcattaccgttcacgtgggtaacggcgcatcagttgcggcggtgaagaatggcgtatctgttgacacttccatgggtttcacaccacttgaaggtcttgtcatgggcacgcgcagcggcgatattgatccggccatcgtggaatttcttgagaaagaagaaggattgtcggccaaagaagtcgtcaacatcctcaacaagaaatctggtgtgtatgggctcaccaaaggctttagtagtgacatgcgtgacattgaagataatgctattgaaggtgatcctgtatgccgccttgcattcgatgtgtacgaatatcgtatcgcgaaatatattggcgcatacgctgcggccatgaacggtgttgacgcgatcgtctttaccgcaggagttggcgaaaatagcccgattatgcgcgaagaaattattgagaactacttgggctacttagggatcaagatcgataaagaagccaatgacttcaaaggtgaggagaagatcatttcaacgcccgattccaaagtgattgcgatggtagttccgaccaacgaggagctcatgatcgccaaagacacgaaagaaatcattgagaaagggttggacgagcttaagatc

SEQ ID NO: 190 - protein, 417 aa, synthetic construct
  REGION 1..417: note = Variant of acetate kinase
MHHHHHHGGSGMKVLVINSGSSSIKYQLLDMTNEKVLAKGLVERIGIDGSRIVHKVNGEKHVLEHEIKNHEIGLKLVLDLLTDEKYGVLKDLKEIDAVGHRVVHGGERFASSVKITDEVLKTIETLSFLAPLHNPLNIMGIKSSMKLLPGVPQVAVFDTAFHQKMPEKAYLYAIPYEYYEKYKIRRYGFHGTSHRYVSKRAAEIMGKPYDQLKIITVHVGNGASVAAVKNGVSVDTSMGFTPLEGLVMGTRSGDIDPAIVEFLEKEEGLSAKEVVNILNKKSGVYGLTKGFSSDMRDIEDNAIEGDPVCRLAFDVYEYRIAKYIGAYAAAMNGVDAIVFTAGVGENSPIMREEIIENYLGYLGIKIDKEANDFKGEEKIISTPDSKVIAMVVPTNEELMIAKDTKEIIEKGLDELKI

SEQ ID NO: 191 - DNA, 1251 bp, synthetic construct
  misc_feature 1..1251: note = Variant of acetate kinase
  source 1..1251: mol_type = other DNA
atgcaccatcatcatcatcatggcggtagcggcatgaaagttctggtgattaattctggtagctcctccatcaaatatcagctcctcgatatgaccaacgaaaaggtattagcgaaaggcttggtcgagcgcattggcatcgacggttcgcgtatcgtgcataaagttaacggcgaaaaacacgtgctggaacatgagattaaggatcacgaaattggacttaaattggtcctggatcttcttacggacgaaaaatacggtgtgttgaaggatctcaaagaaatcgatgcagttgggcatcgcgtagtacatggcggcgagcgttttgccagtagcgtgaagattactgacgaagtcttaaagaccatcgagacgttgtcgttcttagctccgttacacaatccagcgaacattatgggtatcaagagcagcatgaaattattaccgggtgtgcctcaagttgccgtctttgatacagcgttccaccagaagatgccggagaaagcctatttgtacgcaatcccctatgagtactacgagaaatataaaattcgccgctatgggtttcatggaacctcacatcgttatgtgagtaaacgtgctgcggaaattatgggcaaaccgtacgatcagctcaagatcattaccgttcacgtgggtaacggcgcatcagttgcggcggtgaagaatggcgtatctgttgacacttccatgggtttcacaccacttgaaggtcttgtcatgggcacgcgcagcggcgatattgatccggccatcgtggaatttcttgagaaagaagaaggattgtcggccaaagaagtcgtcaacatcctcaacaagaaatctggtgtgtatgggctcaccaaaggctttagtagtgacatgcgtgacattgaagataatgctattgaaggtgatcctgtatgccgccttgcattcgatgtgtacgaatatcgtatcgcgaaatatattggcgcatacgctgcggccatgaacggtgttgacgcgatcgtctttaccgcaggagttggcgaaaatagcccgattatgcgcgaagaaattattgagaactacttgggctacttagggatcaagatcgataaagaagccaatgacttcaaaggtgaggagaagatcatttcaacgcccgattccaaagtgattgcgatggtagttccgaccaacgaggagctcatgatcgccaaagacacgaaagaaatcattgagaaagggttggacgagcttaagatc

SEQ ID NO: 192 - protein, 417 aa, synthetic construct
  REGION 1..417: note = Variant of acetate kinase
MHHHHHHGGSGMKVLVINSGSSSIKYQLLDMTNEKVLAKGLVERIGIDGSRIVHKVNGEKHVLEHEIKDHEIGLKLVLDLLTDEKYGVLKDLKEIDAVGHRVVHGGERFASSVKITDEVLKTIETLSFLAPLHNPANIMGIKSSMKLLPGVPQVAVFDTAFHQKMPEKAYLYAIPYEYYEKYKIRRYGFHGTSHRYVSKRAAEIMGKPYDQLKIITVHVGNGASVAAVKNGVSVDTSMGFTPLEGLVMGTRSGDIDPAIVEFLEKEEGLSAKEVVNILNKKSGVYGLTKGFSSDMRDIEDNAIEGDPVCRLAFDVYEYRIAKYIGAYAAAMNGVDAIVFTAGVGENSPIMREEIIENYLGYLGIKIDKEANDFKGEEKIISTPDSKVIAMVVPTNEELMIAKDTKEIIEKGLDELKI

SEQ ID NO: 193 - DNA, 1251 bp, synthetic construct
  misc_feature 1..1251: note = Variant of acetate kinase
  source 1..1251: mol_type = other DNA
atgcaccatcatcatcatcatggcggtagcggcatgaaagttctggtgattaattctggtagctcctccatcaaatatcagctcctcgatatgaccaacgaaaaggtattagcgaaaggcttggtcgagcgcattggcatcgacggttcgcgtatcgtgcataaagttaacggcgaaaaacacgtgctggaacatgagattccgaatcacgaaattggacttaaattggtcctggatcttcttacggacgaaaaatacggtgtgttgaaggatctcaaagaaatcgatgcagttgggcatcgcgtagtacatggcggcgagcgttttgccagtagcgtgaagattactgacgaagtcttaaagaccatcgagacgttgtcgttcttagctccgttacacaatccagcgaacattatgggtatcaagagcagcatgaaattattaccgggtgtgcctcaagttgccgtctttgatacagcgttccaccagaagatgccggagaaagcctatttgtacgcaatcccctatgagtactacgagaaatataaaattcgccgctatgggtttcatggaacctcacatcgttatgtgagtaaacgtgctgcggaaattatgggcaaaccgtacgatcagctcaagatcattaccgttcacgtgggtaacggcgcatcagttgcggcggtgaagaatggcgtatctgttgacacttccatgggtttcacaccacttgaaggtcttgtcatgggcacgcgcagcggcgatattgatccggccatcgtggaatttcttgagaaagaagaaggattgtcggccaaagaagtcgtcaacatcctcaacaagaaatctggtgtgtatgggctcaccaaaggctttagtagtgacatgcgtgacattgaagataatgctattgaaggtgatcctgtatgccgccttgcattcgatgtgtacgaatatcgtatcgcgaaatatattggcgcatacgctgcggccatgaacggtgttgacgcgatcgtctttaccgcaggagttggcgaaaatagcccgattatgcgcgaagaaattattgagaactacttgggctacttagggatcaagatcgataaagaagccaatgacttcaaaggtgaggagaagatcatttcaacgcccgattccaaagtgattgcgatggtagttccgaccaacgaggagctcatgatcgccaaagacacgaaagaaatcattgagaaagggttggacgagcttaagatc

SEQ ID NO: 194 - protein, 417 aa, synthetic construct
  REGION 1..417: note = Variant of acetate kinase
MHHHHHHGGSGMKVLVINSGSSSIKYQLLDMTNEKVLAKGLVERIGIDGSRIVHKVNGEKHVLEHEIPNHEIGLKLVLDLLTDEKYGVLKDLKEIDAVGHRVVHGGERFASSVKITDEVLKTIETLSFLAPLHNPANIMGIKSSMKLLPGVPQVAVFDTAFHQKMPEKAYLYAIPYEYYEKYKIRRYGFHGTSHRYVSKRAAEIMGKPYDQLKIITVHVGNGASVAAVKNGVSVDTSMGFTPLEGLVMGTRSGDIDPAIVEFLEKEEGLSAKEVVNILNKKSGVYGLTKGFSSDMRDIEDNAIEGDPVCRLAFDVYEYRIAKYIGAYAAAMNGVDAIVFTAGVGENSPIMREEIIENYLGYLGIKIDKEANDFKGEEKIISTPDSKVIAMVVPTNEELMIAKDTKEIIEKGLDELKI

SEQ ID NO: 195 - DNA, 1251 bp, synthetic construct
  misc_feature 1..1251: note = Variant of acetate kinase
  source 1..1251: mol_type = other DNA
atgcaccatcatcatcatcatggcggtagcggcatgaaagttctggtgattaattctggtagctcctccatcaaatatcagctcctcgatatgaccaacgaaaaggtattagcgaaaggcttggtcgagcgcattggcatcgacggttcgcgtatcgtgcataaagttaacggcgaaaaacacgtgctggaacatgagattaagaatcacgaaattggacttaaattggtcctggatcttcttacggacgaaaaatacggtgtgttgaaggatctcaaagaaatcgatgcagttgggcatcgcgtagtacatggcggcgagcgttttgccagtagcgtgaagattactgacgaagtcttaaagaccatcgagacgttgtcgttcttagctccgttacacaatccagcgaacattatgggtatcaagagcagcatgaaattattaccgggtgtgcctcaagttgccgtctttgatacagcgttccaccagaagatgccggagaaagcctatttgtacgcaatcccctatgagtactacgagaaatataaaattcgccgctatgggtttcatggaacctcacatcgttatgtgagtaaacgtgctgcggaaattatgggcaaaccgtacgatcagctcaagatcattaccgttcacgtgggtaacggcgcatcagttgcggcggtgaagaatggcgtatctgttgacacttccatgggtttcacaccacttgaaggtcttgtcatgggcacgcgcagcggcgatattgatccggccatcgtggaatttcttgagaaagaagaaggattgtcggccaaagaagtcgtcaacatcctcaacaagaaatctggtgtgtatgggctcaccaaaggctttagtagtgacatgcgtgacattgaagataatgctattgaaggtgatcctgtatgccgccttgcattcgatgtgtacgaatatcgtatcgcgaaatatattggcgcatacgctgcggccatgaacggtgttgacgcgatcgtctttaccgcaggagttggcgaaaatagcccgattatgcgcgaagaaattattgagaactacttgggctacttagggatcaagatcgataaagaagccaatgacttcaaaggtgaggagaagatcatttcaacgcccgattccaaagtgattgcgatggtaatcccgaccaacgaggagctcatgatcgccaaagacacgaaagaaatcattgagaaagggttggacgagcttaagatc

SEQ ID NO: 196 - protein, 417 aa, synthetic construct
  REGION 1..417: note = Variant of acetate kinase
MHHHHHHGGSGMKVLVINSGSSSIKYQLLDMTNEKVLAKGLVERIGIDGSRIVHKVNGEKHVLEHEIKNHEIGLKLVLDLLTDEKYGVLKDLKEIDAVGHRVVHGGERFASSVKITDEVLKTIETLSFLAPLHNPANIMGIKSSMKLLPGVPQVAVFDTAFHQKMPEKAYLYAIPYEYYEKYKIRRYGFHGTSHRYVSKRAAEIMGKPYDQLKIITVHVGNGASVAAVKNGVSVDTSMGFTPLEGLVMGTRSGDIDPAIVEFLEKEEGLSAKEVVNILNKKSGVYGLTKGFSSDMRDIEDNAIEGDPVCRLAFDVYEYRIAKYIGAYAAAMNGVDAIVFTAGVGENSPIMREEIIENYLGYLGIKIDKEANDFKGEEKIISTPDSKVIAMVIPTNEELMIAKDTKEIIEKGLDELKI

SEQ ID NO: 197 - DNA, 1251 bp, synthetic construct
  misc_feature 1..1251: note = Variant of acetate kinase
  source 1..1251: mol_type = other DNA
atgcaccatcatcatcatcatggcggtagcggcatgaaagttctggtgattaattctggtagctcctccatcaaatatcagctcctcgatatgaccaacgaaaaggtattagcgaaaggcttggtcgagcgcattggcatcgacggttcgcgtatcgtgcataaagttaacggcgaaaaacacgtgctggaacatgagattaagaatcacgaagtgggacttaaattggtcctggatcttcttacggacgaaaaatacggtgtgttgaaggatctcaaagaaatcgatgcagttgggcatcgcgtagtacatggcggcgagcgttttgccagtagcgtgaagattactgacgaagtcttaaagaccatcgagacgttgtcgttcttagctccgttacacaatccagcgaacattatgggtatcaagagcagcatgaaattattaccgggtgtgcctcaagttgccgtctttgatacagcgttccaccagaagatgccggagaaagcctatttgtacgcaatcccctatgagtactacgagaaatataaaattcgccgctatgggtttcatggaacctcacatcgttatgtgagtaaacgtgctgcggaaattatgggcaaaccgtacgatcagctcaagatcattaccgttcacgtgggtaacggcgcatcagttgcggcggtgaagaatggcgtatctgttgacacttccatgggtttcacaccacttgaaggtcttgtcatgggcacgcgcagcggcgatattgatccggccatcgtggaatttcttgagaaagaagaaggattgtcggccaaagaagtcgtcaacatcctcaacaagaaatctggtgtgtatgggctcaccaaaggctttagtagtgacatgcgtgacattgaagataatgctattgaaggtgatcctgtatgccgccttgcattcgatgtgtacgaatatcgtatcgcgaaatatattggcgcatacgctgcggccatgaacggtgttgacgcgatcgtctttaccgcaggagttggcgaaaatagcccgattatgcgcgaagaaattattgagaactacttgggctacttagggatcaagatcgataaagaagccaatgacttcaaaggtgaggagaagatcatttcaacgcccgattccaaagtgattgcgatggtagttccgaccaacgaggagctcatgatcgccaaagacacgaaagaaatcattgagaaagggttggacgagcttaagatc

SEQ ID NO: 198 - protein, 417 aa, synthetic construct
  REGION 1..417: note = Variant of acetate kinase
MHHHHHHGGSGMKVLVINSGSSSIKYQLLDMTNEKVLAKGLVERIGIDGSRIVHKVNGEKHVLEHEIKNHEVGLKLVLDLLTDEKYGVLKDLKEIDAVGHRVVHGGERFASSVKITDEVLKTIETLSFLAPLHNPANIMGIKSSMKLLPGVPQVAVFDTAFHQKMPEKAYLYAIPYEYYEKYKIRRYGFHGTSHRYVSKRAAEIMGKPYDQLKIITVHVGNGASVAAVKNGVSVDTSMGFTPLEGLVMGTRSGDIDPAIVEFLEKEEGLSAKEVVNILNKKSGVYGLTKGFSSDMRDIEDNAIEGDPVCRLAFDVYEYRIAKYIGAYAAAMNGVDAIVFTAGVGENSPIMREEIIENYLGYLGIKIDKEANDFKGEEKIISTPDSKVIAMVVPTNEELMIAKDTKEIIEKGLDELKI

SEQ ID NO: 199 - DNA, 1251 bp, synthetic construct
  misc_feature 1..1251: note = Variant of acetate kinase
  source 1..1251: mol_type = other DNA
atgcaccatcatcatcatcatggcggtagcggcatgaaagttctggtgattaattctggtagctcctccatcaaatatcagctcctcgatatgaccaacgaaaaggtattagcgaaaggcttggtcgagcgcattggcatcgacggttgtcgtatcgtgcataaagttaacggcgaaaaacacgtgctggaacatgagattaagaatcacgaaattggacttaaattggtcctggatcttcttacggacgaaaaatacggtgtgttgaaggatctcaaagaaatcgatgcagttgggcatcgcgtagtacatggcggcgagcgttttgccagtagcgtgaagattactgacgaagtcttaaagaccatcgagacgttgtcgttcttagctccgttacacaatccagcgaacattatgggtatcaagagcagcatgaaattattaccgggtgtgcctcaagttgccgtctttgatacagcgttccaccagaagatgccggagaaagcctatttgtacgcaatcccctatgagtactacgagaaatataaaattcgccgctatgggtttcatggaacctcacatcgttatgtgagtaaacgtgctgcggaaattatgggcaaaccgtacgatcagctcaagatcattaccgttcacgtgggtaacggcgcatcagttgcggcggtgaagaatggcgtatctgttgacacttccatgggtttcacaccacttgaaggtcttgtcatgggcacgcgcagcggcgatattgatccggccatcgtggaatttcttgagaaagaagaaggattgtcggccaaagaagtcgtcaacatcctcaacaagaaatctggtgtgtatgggctcaccaaaggctttagtagtgacatgcgtgacattgaagataatgctattgaaggtgatcctgtatgccgccttgcattcgatgtgtacgaatatcgtatcgcgaaatatattggcgcatacgctgcggccatgaacggtgttgacgcgatcgtctttaccgcaggagttggcgaaaatagcccgattatgcgcgaagaaattattgagaactacttgggctacttagggatcaagatcgataaagaagccaatgacttcaaaggtgaggagaagatcatttcaacgcccgattccaaagtgattgcgatggtagttccgaccaacgaggagctcatgatcgccaaagacacgaaagaaatcattgagaaagggttggacgagcttaagatc

SEQ ID NO: 200 - protein, 417 aa, synthetic construct
  REGION 1..417: note = Variant of acetate kinase
MHHHHHHGGSGMKVLVINSGSSSIKYQLLDMTNEKVLAKGLVERIGIDGCRIVHKVNGEKHVLEHEIKNHEIGLKLVLDLLTDEKYGVLKDLKEIDAVGHRVVHGGERFASSVKITDEVLKTIETLSFLAPLHNPANIMGIKSSMKLLPGVPQVAVFDTAFHQKMPEKAYLYAIPYEYYEKYKIRRYGFHGTSHRYVSKRAAEIMGKPYDQLKIITVHVGNGASVAAVKNGVSVDTSMGFTPLEGLVMGTRSGDIDPAIVEFLEKEEGLSAKEVVNILNKKSGVYGLTKGFSSDMRDIEDNAIEGDPVCRLAFDVYEYRIAKYIGAYAAAMNGVDAIVFTAGVGENSPIMREEIIENYLGYLGIKIDKEANDFKGEEKIISTPDSKVIAMVVPTNEELMIAKDTKEIIEKGLDELKI

SEQ ID NO: 201 - DNA, 1251 bp, synthetic construct
  misc_feature 1..1251: note = Variant of acetate kinase
  source 1..1251: mol_type = other DNA
atgcaccatcatcatcatcatggcggtagcggcatgaaagttctggtgattaattctggtagctcctccatcaaatatcagctcctcgatatgaccaacgaaaaggtattagcgaaaggcttggtcgagcgcattggcatcgacggttcgcgtatcgtgcataaagttaacggcgaaaaacacgtgctggaacatgcgattaagaatcacgaaattggacttaaattggtcctggatcttcttacggacgaaaaatacggtgtgttgaaggatctcaaagaaatcgatgcagttgggcatcgcgtagtacatggcggcgagcgttttgccagtagcgtgaagattactgacgaagtcttaaagaccatcgagacgttgtcgttcttagctccgttacacaatccagcgaacattatgggtatcaagagcagcatgaaattattaccgggtgtgcctcaagttgccgtctttgatacagcgttccaccagaagatgccggagaaagcctatttgtacgcaatcccctatgagtactacgagaaatataaaattcgccgctatgggtttcatggaacctcacatcgttatgtgagtaaacgtgctgcggaaattatgggcaaaccgtacgatcagctcaagatcattaccgttcacgtgggtaacggcgcatcagttgcggcggtgaagaatggcgtatctgttgacacttccatgggtttcacaccacttgaaggtcttgtcatgggcacgcgcagcggcgatattgatccggccatcgtggaatttcttgagaaagaagaaggattgtcggccaaagaagtcgtcaacatcctcaacaagaaatctggtgtgtatgggctcaccaaaggctttagtagtgacatgcgtgacattgaagataatgctattgaaggtgatcctgtatgccgccttgcattcgatgtgtacgaatatcgtatcgcgaaatatattggcgcatacgctgcggccatgaacggtgttgacgcgatcgtctttaccgcaggagttggcgaaaatagcccgattatgcgcgaagaaattattgagaactacttgggctacttagggatcaagatcgataaagaagccaatgacttcaaaggtgaggagaagatcatttcaacgcccgattccaaagtgattgcgatggtagttccgaccaacgaggagctcatgatcgccaaagacacgaaagaaatcattgagaaagggttggacgagcttaagatc

SEQ ID NO: 202 - protein, 417 aa, synthetic construct
  REGION 1..417: note = Variant of acetate kinase
MHHHHHHGGSGMKVLVINSGSSSIKYQLLDMTNEKVLAKGLVERIGIDGSRIVHKVNGEKHVLEHAIKNHEIGLKLVLDLLTDEKYGVLKDLKEIDAVGHRVVHGGERFASSVKITDEVLKTIETLSFLAPLHNPANIMGIKSSMKLLPGVPQVAVFDTAFHQKMPEKAYLYAIPYEYYEKYKIRRYGFHGTSHRYVSKRAAEIMGKPYDQLKIITVHVGNGASVAAVKNGVSVDTSMGFTPLEGLVMGTRSGDIDPAIVEFLEKEEGLSAKEVVNILNKKSGVYGLTKGFSSDMRDIEDNAIEGDPVCRLAFDVYEYRIAKYIGAYAAAMNGVDAIVFTAGVGENSPIMREEIIENYLGYLGIKIDKEANDFKGEEKIISTPDSKVIAMVVPTNEELMIAKDTKEIIEKGLDELKI

SEQ ID NO: 203 - DNA, 1251 bp, synthetic construct
  misc_feature 1..1251: note = Variant of acetate kinase
  source 1..1251: mol_type = other DNA
atgcaccatcatcatcatcatggcggtagcggcatgaaagttctggtgattaattctggtagctcctccatcaaatatcagctcctcgatatgaccaacgaaaaggtattagcgaaaggcttggtcgagcgcattggcatcgacggttcgcgtatcgtgcataaagttaacggcgaaaaacacgtgctggaacatgagattaagaatcacgaaattggacttaaattggtcctggatcttcttacggacgaaaaatacggtgtgttgaaggatctcaaagaaatcgatgcagttgggcatcgcgtagtacatggcggcgagcgttttgccagtagcgtgaagattactgacgaagtcttaaagaccatcgagacgttgtcgttcttagctccgttacacaatccagcgaacattatgggtatcaagagcagcatgaaattattaccgggtgtgcctcaagttgcctcgtttgatacagcgttccaccagaagatgccggagaaagcctatttgtacgcaatcccctatgagtactacgagaaatataaaattcgccgctatgggtttcatggaacctcacatcgttatgtgagtaaacgtgctgcggaaattatgggcaaaccgtacgatcagctcaagatcattaccgttcacgtgggtaacggcgcatcagttgcggcggtgaagaatggcgtatctgttgacacttccatgggtttcacaccacttgaaggtcttgtcatgggcacgcgcagcggcgatattgatccggccatcgtggaatttcttgagaaagaagaaggattgtcggccaaagaagtcgtcaacatcctcaacaagaaatctggtgtgtatgggctcaccaaaggctttagtagtgacatgcgtgacattgaagataatgctattgaaggtgatcctgtatgccgccttgcattcgatgtgtacgaatatcgtatcgcgaaatatattggcgcatacgctgcggccatgaacggtgttgacgcgatcgtctttaccgcaggagttggcgaaaatagcccgattatgcgcgaagaaattattgagaactacttgggctacttagggatcaagatcgataaagaagccaatgacttcaaaggtgaggagaagatcatttcaacgcccgattccaaagtgattgcgatggtagttccgaccaacgaggagctcatgatcgccaaagacacgaaagaaatcattgagaaagggttggacgagcttaagatc

SEQ ID NO: 204 - protein, 417 aa, synthetic construct
  REGION 1..417: note = Variant of acetate kinase
MHHHHHHGGSGMKVLVINSGSSSIKYQLLDMTNEKVLAKGLVERIGIDGSRIVHKVNGEKHVLEHEIKNHEIGLKLVLDLLTDEKYGVLKDLKEIDAVGHRVVHGGERFASSVKITDEVLKTIETLSFLAPLHNPANIMGIKSSMKLLPGVPQVASFDTAFHQKMPEKAYLYAIPYEYYEKYKIRRYGFHGTSHRYVSKRAAEIMGKPYDQLKIITVHVGNGASVAAVKNGVSVDTSMGFTPLEGLVMGTRSGDIDPAIVEFLEKEEGLSAKEVVNILNKKSGVYGLTKGFSSDMRDIEDNAIEGDPVCRLAFDVYEYRIAKYIGAYAAAMNGVDAIVFTAGVGENSPIMREEIIENYLGYLGIKIDKEANDFKGEEKIISTPDSKVIAMVVPTNEELMIAKDTKEIIEKGLDELKI

SEQ ID NO: 205 - DNA, 1251 bp, synthetic construct
  misc_feature 1..1251: note = Variant of acetate kinase
  source 1..1251: mol_type = other DNA
atgcaccatcatcatcatcatggcggtagcggcatgaaagttctggtgattaattctggtagctcctccatcaaatatcagctcctcgatatgaccaacgaaaaggtattagcgaaaggcttggtcgagcgcattggcatcgacggttcgcgtatcgtgcataaagttaacggcgaaaaacacgtgctggaacatgagattaagaatcacgaaattggacttaaattggtcctggatcttcttacggacgaaaaatacggtgtgttgaaggatctcaaagaaatcgatgcagttgggcatcgcgtagtacatggcggcgagcgttttgccagtagcgtgaagattactgacgaagtcttaaagaccatcgagacgttgtcgttcttagctccgttacacaatccagcgaacattatgggtatcaagagcagcatgaaattattaccgggtgtgcctcaagttgccgtctttgatacagcgttccaccagaagatgccggagaaagcctatttgtacgcaatcccctatgagtactacgagaaatataaaattcgccgctatgggtttcatggaacctcacatcgttatgtgagtaaacgtgctgcggaaattatgggcaaaccgtacgatcagctcaagatcattaccgttcacgtgggtaacggcgcatcagttgcggcggtgaagaatggcgtatctgttgacacttccatgggtttcacaccacttgaaggtcttgtcatgggcacgcgcagcggcgatattgatccggccatcgtggaatttcttgagaaagaagaaggattgtcggccaaagaagtcgtctggatcctcaacaagaaatctggtgtgtatgggctcaccaaaggctttagtagtgacatgcgtgacattgaagataatgctattgaaggtgatcctgtatgccgccttgcattcgatgtgtacgaatatcgtatcgcgaaatatattggcgcatacgctgcggccatgaacggtgttgacgcgatcgtctttaccgcaggagttggcgaaaatagcccgattatgcgcgaagaaattattgagaactacttgggctacttagggatcaagatcgataaagaagccaatgacttcaaaggtgaggagaagatcatttcaacgcccgattccaaagtgattgcgatggtagttccgaccaacgaggagctcatgatcgccaaagacacgaaagaaatcattgagaaagggttggacgagcttaagatc

SEQ ID NO: 206 - protein, 417 aa, synthetic construct
  REGION 1..417: note = Variant of acetate kinase
MHHHHHHGGSGMKVLVINSGSSSIKYQLLDMTNEKVLAKGLVERIGIDGSRIVHKVNGEKHVLEHEIKNHEIGLKLVLDLLTDEKYGVLKDLKEIDAVGHRVVHGGERFASSVKITDEVLKTIETLSFLAPLHNPANIMGIKSSMKLLPGVPQVAVFDTAFHQKMPEKAYLYAIPYEYYEKYKIRRYGFHGTSHRYVSKRAAEIMGKPYDQLKIITVHVGNGASVAAVKNGVSVDTSMGFTPLEGLVMGTRSGDIDPAIVEFLEKEEGLSAKEVVWILNKKSGVYGLTKGFSSDMRDIEDNAIEGDPVCRLAFDVYEYRIAKYIGAYAAAMNGVDAIVFTAGVGENSPIMREEIIENYLGYLGIKIDKEANDFKGEEKIISTPDSKVIAMVVPTNEELMIAKDTKEIIEKGLDELKI

SEQ ID NO: 207 - DNA, 1251 bp, synthetic construct
  misc_feature 1..1251: note = Variant of acetate kinase
  source 1..1251: mol_type = other DNA
atgcaccatcatcatcatcatggcggtagcggcatgaaagttctggtgattaattctggtagctcctccatcaaatatcagctcctcgatatgaccaacgaaaaggtattagcgaaaggcttggtcgagcgcattggcatcgacggttcgcgtatcgtgcataaagttaacggcgaaaaacacgtgctggaacatgagattaagaatcacgaaattggacttaaattggtcctggatcttcttacggacgaaaaatacggtgtgttgaaggatctcaaagaaatcgatgcagttgggcatcgcgtagtacatggcggcgagcgttttgccagtagcgtgaagattactgacgaagtcttaaagaccatcgagacgttgtcgttcttagctccgttacacaatccagcgaacattatgggtatcaagagcagcatgaaattattaccgggtgtgcctcaagttgccgcttttgatacagcgttccaccagaagatgccggagaaagcctatttgtacgcaatcccctatgagtactacgagaaatataaaattcgccgctatgggtttcatggaacctcacatcgttatgtgagtaaacgtgctgcggaaattatgggcaaaccgtacgatcagctcaagatcattaccgttcacgtgggtaacggcgcatcagttgcggcggtgaagaatggcgtatctgttgacacttccatgggtttcacaccacttgaaggtcttgtcatgggcacgcgcagcggcgatattgatccggccatcgtggaatttcttgagaaagaagaaggattgtcggccaaagaagtcgtcaacatcctcaacaagaaatctggtgtgtatgggctcaccaaaggctttagtagtgacatgcgtgacattgaagataatgctattgaaggtgatcctgtatgccgccttgcattcgatgtgtacgaatatcgtatcgcgaaatatattggcgcatacgctgcggccatgaacggtgttgacgcgatcgtctttaccgcaggagttggcgaaaatagcccgattatgcgcgaagaaattattgagaactacttgggctacttagggatcaagatcgataaagaagccaatgacttcaaaggtgaggagaagatcatttcaacgcccgattccaaagtgattgcgatggtagttccgaccaacgaggagctcatgatcgccaaagacacgaaagaaatcattgagaaagggttggacgagcttaagatc

SEQ ID NO: 208 - protein, 417 aa, synthetic construct
  REGION 1..417: note = Variant of acetate kinase
MHHHHHHGGSGMKVLVINSGSSSIKYQLLDMTNEKVLAKGLVERIGIDGSRIVHKVNGEKHVLEHEIKNHEIGLKLVLDLLTDEKYGVLKDLKEIDAVGHRVVHGGERFASSVKITDEVLKTIETLSFLAPLHNPANIMGIKSSMKLLPGVPQVAAFDTAFHQKMPEKAYLYAIPYEYYEKYKIRRYGFHGTSHRYVSKRAAEIMGKPYDQLKIITVHVGNGASVAAVKNGVSVDTSMGFTPLEGLVMGTRSGDIDPAIVEFLEKEEGLSAKEVVNILNKKSGVYGLTKGFSSDMRDIEDNAIEGDPVCRLAFDVYEYRIAKYIGAYAAAMNGVDAIVFTAGVGENSPIMREEIIENYLGYLGIKIDKEANDFKGEEKIISTPDSKVIAMVVPTNEELMIAKDTKEIIEKGLDELKI

SEQ ID NO: 209 - DNA, 1251 bp, synthetic construct
  misc_feature 1..1251: note = Variant of acetate kinase
  source 1..1251: mol_type = other DNA
atgcaccatcatcatcatcatggcggtagcggcatgaaagttctggtgattaattctggtagctcctccatcaaatatcagctcctcgatatgaccaacgaaaaggtattagcgaaaggcttggtcgagcgcattggcatcgacggttcgcgtattgtgcataaagttaacggcgaaaaacacgtgctggaacatgagattaaggatcacgaaattggacttaaattggtcctggatcttcttacggacgaaaaatacggtgtgttgaaggatctcaaagaaatcgatgcagttgggcatcgcgtagtacatggcggcgagcgttttgccagtagcgtgaagattactgacgaagtcttaaagaccatcgagacgttgtcgttcttagctccgttacacaatccagcgaacattatgggtatcaagagcagcatgaaattaatgccgggtgtgcctcaagttgccgtctttgatacagcgttccaccagaagatgccggagaaagcctatttgtacgcaatcccctatgagtactacgagaaatataaaattcgccgctatgggtttcatggaacctcacatcgttatgtgagtaaacgtgctgcggaaattatgggcaaaccgtacgatcagctcaagatcattaccgttcacgtgggtaacggcgcatcagttgcggcggtgaagaatggcgtatctgttgacacttccatgggtttcacaccacttgaaggtcttgtcatgggcacgcgcagcggcgatattgatccggccatcgtggaatttcttgagaaagaagaaggattgtcggccaaagaagtcgtcaacatcctcaacaagaaatctggtgtgtatgggctcaccaaaggctttagtagtgacatgcgtgacattgaagataatgctattgaaggtgatcctgtatgccgccttgcattcgatgtgtacgaatatcgtatcgcgaaatatattggcgcatacgctgcggccatgaacggtgttgacgcgatcgtctttaccgcaggagttggcgaaaatagcagcattatgcgcgaagaaattattgagaactacttgggctacttagggatcaagatcgataaagaagccaatcgcttcaaaggtgaggagaagatcatttcaacgcccgattccaaagtgattgcgatggtaattccgaccaacgaggagctcatgatcgccaaagacacgaaagaaatcattgagaaagggttggacgagcttaagatc

SEQ ID NO: 210 - protein, 417 aa, synthetic construct
  REGION 1..417: note = Variant of acetate kinase
MHHHHHHGGSGMKVLVINSGSSSIKYQLLDMTNEKVLAKGLVERIGIDGSRIVHKVNGEKHVLEHEIKDHEIGLKLVLDLLTDEKYGVLKDLKEIDAVGHRVVHGGERFASSVKITDEVLKTIETLSFLAPLHNPANIMGIKSSMKLMPGVPQVAVFDTAFHQKMPEKAYLYAIPYEYYEKYKIRRYGFHGTSHRYVSKRAAEIMGKPYDQLKIITVHVGNGASVAAVKNGVSVDTSMGFTPLEGLVMGTRSGDIDPAIVEFLEKEEGLSAKEVVNILNKKSGVYGLTKGFSSDMRDIEDNAIEGDPVCRLAFDVYEYRIAKYIGAYAAAMNGVDAIVFTAGVGENSSIMREEIIENYLGYLGIKIDKEANRFKGEEKIISTPDSKVIAMVIPTNEELMIAKDTKEIIEKGLDELKI

SEQ ID NO: 211 - DNA, 1251 bp, synthetic construct
  misc_feature 1..1251: note = Variant of acetate kinase
  source 1..1251: mol_type = other DNA
atgcaccatcatcatcatcatggcggtagcggcatgaaagttctggtgattaattctggtagctcctccatcaaatatcagctcctcgatatgaccaacgaaaaggtattagcgaaaggcttggtcgagcgcattggcatcgacggttcgcgtcttgtgcataaagttaacggcgaaaaacacgtgctggaacatgagattaaggatcacgaaattggacttaaattggtcctggatcttcttacggacgaaaaatacggtgtgttgaaggatctcaaagaaatcgatgcagttgggcatcgcgtagtacatggcggcgagcgttttgccagtagcgtgaagattactgacgaagtcttaaagaccatcgagacgttgtcgttcttagctccgttacacaatccagcgaacattatgggtatcaagagcagcatgaaattaatgccgggtgtgcctcaagttgccgtctttgatacagcgttccaccagaagatgccggagaaagcctatttgtacgcaatcccctatgagtactacgagaaatataaaattcgccgctatgggtttcatggaacctcacatcgttatgtgagtaaacgtgctgcggaaattatgggcaaaccgtacgatcagctcaagatcattaccgttcacgtgggtaacggcgcatcagttgcggcggtgaagaatggcgtatctgttgacacttccatgggtttcacaccacttgaaggtcttgtcatgggcacgcgcagcggcgatattgatccggccatcgtggaatttcttgagaaagaagaaggattgtcggccaaagaagtcgtcaacatcctcaacaagaaatctggtgtgtatgggctcaccaaaggctttagtagtgacatgcgtgacattgaagataatgctattgaaggtgatcctgtatgccgccttgcattcgatgtgtacgaatatcgtatcgcgaaatatattggcgcatacgctgcggccatgaacggtgttgacgcgatcgtctttaccgcaggagttggcgaaaatagcagcattatgcgcgaagaaattattgagaactacttgggctacttagggatcaagatcgataaagaagccaatgacttcaaaggtgaggagaagatcatttcaacgcccgattccaaagtgattgcgatggtaattccgaccaacgaggagctcatgatcgccaaagacacgaaagaaatcattgagaaagggttggacgagcttaagatc

SEQ ID NO: 212 - protein, 417 aa, synthetic construct
  REGION 1..417: note = Variant of acetate kinase
MHHHHHHGGSGMKVLVINSGSSSIKYQLLDMTNEKVLAKGLVERIGIDGSRLVHKVNGEKHVLEHEIKDHEIGLKLVLDLLTDEKYGVLKDLKEIDAVGHRVVHGGERFASSVKITDEVLKTIETLSFLAPLHNPANIMGIKSSMKLMPGVPQVAVFDTAFHQKMPEKAYLYAIPYEYYEKYKIRRYGFHGTSHRYVSKRAAEIMGKPYDQLKIITVHVGNGASVAAVKNGVSVDTSMGFTPLEGLVMGTRSGDIDPAIVEFLEKEEGLSAKEVVNILNKKSGVYGLTKGFSSDMRDIEDNAIEGDPVCRLAFDVYEYRIAKYIGAYAAAMNGVDAIVFTAGVGENSSIMREEIIENYLGYLGIKIDKEANDFKGEEKIISTPDSKVIAMVIPTNEELMIAKDTKEIIEKGLDELKI

SEQ ID NO: 213 - DNA, 1251 bp, synthetic construct
  misc_feature 1..1251: note = Variant of acetate kinase
  source 1..1251: mol_type = other DNA
atgcaccatcatcatcatcatggcggtagcggcatgaaagttctggtgattaattctggtagctcctccatcaaatatcagctcctcgatatgaccaacgaaaaggtattagcgaaaggcttggtcgagcgcattggcatcgacggttcgcgtcttgtgcataaagttaacggcgaaaaacacgtgctggaacatgagattaagaatcacgaaattggacttaaattggtcctggatcttcttacggacgaaaaatacggtgtgttgaaggatctcaaagaaatcgatgcagttgggcatcgcgtagtacatggcggcgagcgttttgccagtagcgtgaagattactgacgaagtcttaaagaccatcgagacgttgtcgttcttagctccgttacacaatccagcgaacattatgggtatcaagagcagcatgaaattaatgccgggtgtgcctcaagttgccgtctttgatacagcgttccaccagaagatgccggagaaagcctatttgtacgcaatcccctatgagtactacgagaaatataaaattcgccgctatgggtttcatggaacctcacatcgttatgtgagtaaacgtgctgcggaaattatgggcaaaccgtacgatcagctcaagatcattaccgttcacgtgggtaacggcgcatcagttgcggcggtgaagaatggcgtatctgttgacacttccatgggtttcacaccacttgaaggtcttgtcatgggcacgcgcagcggcgatattgatccggccatcgtggaatttcttgagaaagaagaaggattgtcggccaaagaagtcgtcaacatcctcaacaagaaatctggtgtgtatgggctcaccaaaggctttagtagtgacatgcgtgacattgaagataatgctattgaaggtgatcctgtatgccgccttgcattcgatgtgtacgaatatcgtatcgcgaaatatattggcgcatacgctgcggccatgaacggtgttgacgcgatcgtctttaccgcaggagttggcgaaaatagcagcattatgcgcgaagaaattattgagaactacttgggctacttagggatcaagatcgataaagaagccaatcgcttcaaaggtgaggagaagatcatttcaacgcccgattccaaagtgattgcgatggtagttccgaccaacgaggagctcatgatcgccaaagacacgaaagaaatcattgagaaagggttggacgagcttaagatc

SEQ ID NO: 214 - protein, 417 aa, synthetic construct
  REGION 1..417: note = Variant of acetate kinase
MHHHHHHGGSGMKVLVINSGSSSIKYQLLDMTNEKVLAKGLVERIGIDGSRLVHKVNGEKHVLEHEIKNHEIGLKLVLDLLTDEKYGVLKDLKEIDAVGHRVVHGGERFASSVKITDEVLKTIETLSFLAPLHNPANIMGIKSSMKLMPGVPQVAVFDTAFHQKMPEKAYLYAIPYEYYEKYKIRRYGFHGTSHRYVSKRAAEIMGKPYDQLKIITVHVGNGASVAAVKNGVSVDTSMGFTPLEGLVMGTRSGDIDPAIVEFLEKEEGLSAKEVVNILNKKSGVYGLTKGFSSDMRDIEDNAIEGDPVCRLAFDVYEYRIAKYIGAYAAAMNGVDAIVFTAGVGENSSIMREEIIENYLGYLGIKIDKEANRFKGEEKIISTPDSKVIAMVVPTNEELMIAKDTKEIIEKGLDELKI

SEQ ID NO: 215 - DNA, 1251 bp, synthetic construct
  misc_feature 1..1251: note = Variant of acetate kinase
  source 1..1251: mol_type = other DNA
atgcaccatcatcatcatcatggcggtagcggcatgaaagttctggtgattaattctggtagctcctccatcaaatatcagctcctcgatatgaccaacgaaaaggtattagcgaaaggcttggtcgagcgcattggcatcgacggttcgcgtatcgtgcataaagttaacggcgaaaaacacgtgctggaacatgagattaagaatcacgaaattggacttaaattggtcctggatcttcttacggacgaaaaatacggtgtgttgaaggatctcaaagaaatcgatgcagttgggcatcgcgtagtacatggcggcgagcgttttgccagtagcgtgaagattactgacgaagtcttaaagaccatcgagacgttgtcgttcttagctccgttacacaatccagcgaacattatgggtatcaagagcagcatgaaagtgttaccgggtgtgcctcaagttgccgtctttgatacagcgttccaccagaagatgccggagaaagcctatttgtacgcaatcccctatgagtactacgagaaatataaaattcgccgctatgggtttcatggaacctcacatcgttatgtgagtaaacgtgctgcggaaattctgggcaaaccgtacgatcagctcaagatcattaccgttcacgtgggtaacggcgcatcagttgcggcggtgaagaatggcgtatctgttgacacttccatgggtttcacaccacttgaaggtcttgtcatgggcacgcgcagcggcgatattgatccggccatcgtggaatttcttgagaaagaagaaggattgtcggccaaagaagtcgtcaacatcctcaacaagaaatctggtgtgtatgggctcaccaaaggctttagtagtgacatgcgtgacattgaagataatgctattgaaggtgatcctgtatgccgccttgcattagatgtgtacgaatatcgtatcgcgaaatatattggcgcatacgctgcggccatgaacggtgttgacgcgatcgtctttaccgcaggagttggcgaaaatagcccgattatgcgcgaagaaattattgagaactacttgggctacttagggatcaagatcgataaagaagccaatgacgttaaaggtgaggagaagatcatttcaacgcccgattccaaagtgattgcgatggtagttccgaccaacgaggagctcatgatcgccaaagacacgaaagaaatcgttgagaaagggttggacgagcttaagatc

SEQ ID NO: 216 - protein, 417 aa, synthetic construct
  REGION 1..417: note = Variant of acetate kinase
MHHHHHHGGSGMKVLVINSGSSSIKYQLLDMTNEKVLAKGLVERIGIDGSRIVHKVNGEKHVLEHEIKNHEIGLKLVLDLLTDEKYGVLKDLKEIDAVGHRVVHGGERFASSVKITDEVLKTIETLSFLAPLHNPANIMGIKSSMKVLPGVPQVAVFDTAFHQKMPEKAYLYAIPYEYYEKYKIRRYGFHGTSHRYVSKRAAEILGKPYDQLKIITVHVGNGASVAAVKNGVSVDTSMGFTPLEGLVMGTRSGDIDPAIVEFLEKEEGLSAKEVVNILNKKSGVYGLTKGFSSDMRDIEDNAIEGDPVCRLALDVYEYRIAKYIGAYAAAMNGVDAIVFTAGVGENSPIMREEIIENYLGYLGIKIDKEANDVKGEEKIISTPDSKVIAMVVPTNEELMIAKDTKEIVEKGLDELKI

SEQ ID NO: 217 - DNA, 1251 bp, synthetic construct
  misc_feature 1..1251: note = Variant of acetate kinase
  source 1..1251: mol_type = other DNA
atgcaccatcatcatcatcatggcggtagcggcatgaaagttctggtgattaattctggtagctcctccatcaaatatcagctcctcgatatgaccaacgaaaaggtattagcgaaaggcttggtcgagcgcattggcatcgacggttcgcgtattgtgcataaagttaacggcgaaaaacacgtgctggaacatgagattaaggatcacgaaattggacttaaattggtcctggatcttcttacggacgaaaaatacggtgtgttgaaggatctcaaagaaatcgatgcagttgggcatcgcgtagtacatggcggcgagcgttttgccagtagcgtgaagattactgacgaagtcttaaagaccatcgagacgttgtcgttcttagctccgttacacaatccagcgaacattatgggtatcaagagcagcatgaaattaatgccgggtgtgcctcaagttgccgtctttgatacagcgttccaccagaagatgccggagaaagcctatttgtacgcaatcccctatgagtactacgagaaatataaaattcgccgctatgggtttcatggaacctcacatcgttatgtgagtaaacgtgctgcggaaattatgggcaaaccgtacgatcagctcaagatcattaccgttcacgtgggtaacggcgcatcagttgcggcggtgaagaatggcgtatctgttgacacttccatgggtttcacaccacttgaaggtcttgtcatgggcacgcgcagcggcgatattgatccggccatcgtggaatttcttgagaaagaagaaggattgtcggccaaagaagtcgtcaacatcctcaacaagaaatctggtgtgtatgggctcaccaaaggctttagtagtgacatgcgtgacattgaagataatgctattgaaggtgatcctgtatgccgccttgcattcgatgtgtacgaatatcgtatcgcgaaatatattggcgcatacgctgcggccatgaacggtgttgacgcgatcgtctttaccgcaggagttggcgaaaatagcagcattatgcgcgaagaaattattgagaactacttgggctacttagggatcaagatcgataaagaagccaatgatttcaaaggtgaggagaagatcatttcaacgcccgattccaaagtgattgcgatggtaattccgaccaacgaggagctcatgatcgccaaagacacgaaagaaatcattgagaaagggttggacgagcttaagatc

SEQ ID NO: 218 - protein, 417 aa, synthetic construct
  REGION 1..417: note = Variant of acetate kinase
MHHHHHHGGSGMKVLVINSGSSSIKYQLLDMTNEKVLAKGLVERIGIDGSRIVHKVNGEKHVLEHEIKDHEIGLKLVLDLLTDEKYGVLKDLKEIDAVGHRVVHGGERFASSVKITDEVLKTIETLSFLAPLHNPANIMGIKSSMKLMPGVPQVAVFDTAFHQKMPEKAYLYAIPYEYYEKYKIRRYGFHGTSHRYVSKRAAEIMGKPYDQLKIITVHVGNGASVAAVKNGVSVDTSMGFTPLEGLVMGTRSGDIDPAIVEFLEKEEGLSAKEVVNILNKKSGVYGLTKGFSSDMRDIEDNAIEGDPVCRLAFDVYEYRIAKYIGAYAAAMNGVDAIVFTAGVGENSSIMREEIIENYLGYLGIKIDKEANDFKGEEKIISTPDSKVIAMVIPTNEELMIAKDTKEIIEKGLDELKI

SEQ ID NO: 219 - DNA, 1251 bp, synthetic construct
  misc_feature 1..1251: note = Variant of acetate kinase
  source 1..1251: mol_type = other DNA
atgcaccatcatcatcatcatggcggtagcggcatgaaagttctggtgattaattctggtagctcctccatcaaatatcagctcctcgatatgaccaacgaaaaggtattagcgaaaggcttggtcgagcgcattggcatcgacggttcgcgtcttgtgcataaagttaacggcgaaaaacacgtgctggaacatgagattaagaatcacgaaattggacttaaattggtcctggatcttcttacggacgaaaaatacggtgtgttgaaggatctcaaagaaatcgatgcagttgggcatcgcgtagtacatggcggcgagcgttttgccagtagcgtgaagattactgacgaagtcttaaagaccatcgagacgttgtcgttcttagctccgttacacaatccagcgaacattatgggtatcaagagcagcatgaaattattaccgggtgtgcctcaagttgccgtctttgatacagcgttccaccagaagatgccggagaaagcctatttgtacgcaatcccctatgagtactacgagaaatataaaattcgccgctatgggtttcatggaacctcacatcgttatgtgagtaaacgtgctgcggaaattatgggcaaaccgtacgatcagctcaagatcattaccgttcacgtgggtaacggcgcatcagttgcggcggtgaagaatggcgtatctgttgacacttccatgggtttcacaccacttgaaggtcttgtcatgggcacgcgcagcggcgatattgatccggccatcgtggaatttcttgagaaagaagaaggattgtcggccaaagaagtcgtcaacatcctcaacaagaaatctggtgtgtatgggctcaccaaaggctttagtagtgacatgcgtgacattgaagataatgctattgaaggtgatcctgtatgccgccttgcattcgatgtgtacgaatatcgtatcgcgaaatatattggcgcatacgctgcggccatgaacggtgttgacgcgatcgtctttaccgcaggagttggcgaaaatagcagcattatgcgcgaagaaattattgagaactacttgggctacttagggatcaagatcgataaagaagccaatcgcttcaaaggtgaggagaagatcatttcaacgcccgattccaaagtgattgcgatggtagttccgaccaacgaggagctcatgatcgccaaagacacgaaagaaatcattgagaaagggttggacgagcttaagatc

SEQ ID NO: 220 - protein, 417 aa, synthetic construct
  REGION 1..417: note = Variant of acetate kinase
MHHHHHHGGSGMKVLVINSGSSSIKYQLLDMTNEKVLAKGLVERIGIDGSRLVHKVNGEKHVLEHEIKNHEIGLKLVLDLLTDEKYGVLKDLKEIDAVGHRVVHGGERFASSVKITDEVLKTIETLSFLAPLHNPANIMGIKSSMKLLPGVPQVAVFDTAFHQKMPEKAYLYAIPYEYYEKYKIRRYGFHGTSHRYVSKRAAEIMGKPYDQLKIITVHVGNGASVAAVKNGVSVDTSMGFTPLEGLVMGTRSGDIDPAIVEFLEKEEGLSAKEVVNILNKKSGVYGLTKGFSSDMRDIEDNAIEGDPVCRLAFDVYEYRIAKYIGAYAAAMNGVDAIVFTAGVGENSSIMREEIIENYLGYLGIKIDKEANRFKGEEKIISTPDSKVIAMVVPTNEELMIAKDTKEIIEKGLDELKI

SEQ ID NO: 221 - DNA, 1251 bp, synthetic construct
  misc_feature 1..1251: note = Variant of acetate kinase
  source 1..1251: mol_type = other DNA
atgcaccatcatcatcatcatggcggtagcggcatgaaagttctggtgattaattctggtagctcctccatcaaatatcagctcctcgatatgaccaacgaaaaggtattagcgaaaggcttggtcgagcgcattggcatcgacggttcgcgtattgtgcataaagttaacggcgaaaaacacgtgctggaacatgagattaaggatcacgaaattggacttaaattggtcctggatcttcttacggacgaaaaatacggtgtgttgaaggatctcaaagaaatcgatgcagttgggcatcgcgtagtacatggcggcgagcgttttgccagtagcgtgaagattactgacgaagtcttaaagaccatcgagacgttgtcgttcttagctccgttacacaatccagcgaacattatgggtatcaagagcagcatgaaattaatgccgggtgtgcctcaagttgccgtctttgatacagcgttccaccagaagatgccggagaaagcctatttgtacgcaatcccctatgagtactacgagaaatataaaattcgccgctatgggtttcatggaacctcacatcgttatgtgagtaaacgtgctgcggaaattatgggcaaaccgtacgatcagctcaagatcattaccgttcacgtgggtaacggcgcatcagttgcggcggtgaagaatggcgtatctgttgacacttccatgggtttcacaccacttgaaggtcttgtcatgggcacgcgcagcggcgatattgatccggccatcgtggaatttcttgagaaagaagaaggattgtcggccaaagaagtcgtcaacatcctcaacaagaaatctggtgtgtatgggctcaccaaaggctttagtagtgacatgcgtgacattgaagataatgctattgaaggtgatcctgtatgccgccttgcattcgatgtgtacgaatatcgtatcgcgaaatatattggcgcatacgctgcggccatgaacggtgttgacgcgatcgtctttaccgcaggagttggcgaaaatagcagcattatgcgcgaagaaattattgagaactacttgggctacttagggatcaagatcgataaagaagccaatgacttcaaaggtgaggagaagatcatttcaacgcccgattccaaagtgattgcgatggtagttccgaccaacgaggagctcatgatcgccaaagacacgaaagaaatcattgagaaagggttggacgagcttaagatc

SEQ ID NO: 222 - protein, 417 aa, synthetic construct
  REGION 1..417: note = Variant of acetate kinase
MHHHHHHGGSGMKVLVINSGSSSIKYQLLDMTNEKVLAKGLVERIGIDGSRIVHKVNGEKHVLEHEIKDHEIGLKLVLDLLTDEKYGVLKDLKEIDAVGHRVVHGGERFASSVKITDEVLKTIETLSFLAPLHNPANIMGIKSSMKLMPGVPQVAVFDTAFHQKMPEKAYLYAIPYEYYEKYKIRRYGFHGTSHRYVSKRAAEIMGKPYDQLKIITVHVGNGASVAAVKNGVSVDTSMGFTPLEGLVMGTRSGDIDPAIVEFLEKEEGLSAKEVVNILNKKSGVYGLTKGFSSDMRDIEDNAIEGDPVCRLAFDVYEYRIAKYIGAYAAAMNGVDAIVFTAGVGENSSIMREEIIENYLGYLGIKIDKEANDFKGEEKIISTPDSKVIAMVVPTNEELMIAKDTKEIIEKGLDELKI

SEQ ID NO: 223 - DNA, 1251 bp, synthetic construct
  misc_feature 1..1251: note = Variant of acetate kinase
  source 1..1251: mol_type = other DNA
atgcaccatcatcatcatcatggcggtagcggcatgaaagttctggtgattaattctggtagctcctccatcaaatatcagctcctcgatatgaccaacgaaaaggtattagcgaaaggcttggtcgagcgcattggcatcgacggttcgcgtcttgtgcataaagttaacggcgaaaaacacgtgctggaacatgagattaagaatcacgaaattggacttaaattggtcctggatcttcttacggacgaaaaatacggtgtgttgaaggatctcaaagaaatcgatgcagttgggcatcgcgtagtacatggcggcgagcgttttgccagtagcgtgaagattactgacgaagtcttaaagaccatcgagacgttgtcgttcttagctccgttacacaatccactgaacattatgggtatcaagagcagcatgaaattactgccgggtgtgcctcaagttgccgtctttgatacagcgttccaccagaagatgccggagaaagcctatttgtacgcaatcccctatgagtactacgagaaatataaaattcgccgctatgggtttcatggaacctcacatcgttatgtgagtaaacgtgctgcggaaattatgggcaaaccgtacgatcagctcaagatcattaccgttcacgtgggtaacggcgcatcagttgcggcggtgaagaatggcgtatctgttgacacttccatgggtttcacaccacttgaaggtcttgtcatgggcacgcgcagcggcgatattgatccggccatcgtggaatttcttgagaaagaagaaggattgtcggccaaagaagtcgtcaacatcctcaacaagaaatctggtgtgtatgggctcaccaaaggctttagtagtgacatgcgtgacattgaagataatgctattgaaggtgatcctgtatgccgccttgcattcgatgtgtacgaatatcgtatcgcgaaatatattggcgcatacgctgcggccatgaacggtgttgacgcgatcgtctttaccgcaggagttggcgaaaatagcagcattatgcgcgaagaaattattgagaactacttgggctacttagggatcaagatcgataaagaagccaatcgcttcaaaggtgaggagaagatcatttcaacgcccgattccaaagtgattgcgatggtagttccgaccaacgaggagctcatgatcgccaaagacacgaaagaaatcattgagaaagggttggacgagcttaagatc

SEQ ID NO: 224 - protein, 417 aa, synthetic construct
  REGION 1..417: note = Variant of acetate kinase
MHHHHHHGGSGMKVLVINSGSSSIKYQLLDMTNEKVLAKGLVERIGIDGSRLVHKVNGEKHVLEHEIKNHEIGLKLVLDLLTDEKYGVLKDLKEIDAVGHRVVHGGERFASSVKITDEVLKTIETLSFLAPLHNPLNIMGIKSSMKLLPGVPQVAVFDTAFHQKMPEKAYLYAIPYEYYEKYKIRRYGFHGTSHRYVSKRAAEIMGKPYDQLKIITVHVGNGASVAAVKNGVSVDTSMGFTPLEGLVMGTRSGDIDPAIVEFLEKEEGLSAKEVVNILNKKSGVYGLTKGFSSDMRDIEDNAIEGDPVCRLAFDVYEYRIAKYIGAYAAAMNGVDAIVFTAGVGENSSIMREEIIENYLGYLGIKIDKEANRFKGEEKIISTPDSKVIAMVVPTNEELMIAKDTKEIIEKGLDELKI

SEQ ID NO: 225 - DNA, 1251 bp, synthetic construct
  misc_feature 1..1251: note = Variant of acetate kinase
  source 1..1251: mol_type = other DNA
atgcaccatcatcatcatcatggcggtagcggcatgaaagttctggtgattaattctggtagctcctccatcaaatatcagctcctcgatatgaccaacgaaaaggtattagcgaaaggcttggtcgagcgcattggcatcgacggttcgcgtattgtgcataaagttaacggcgaaaaacacgtgctggaacatgagattaagaatcacgaaattggacttaaattggtcctggatcttcttacggacgaaaaatacggtgtgttgaaggatctcaaagaaatcgatgcagttgggcatcgcgtagtacatggcggcgagcgttttgccagtagcgtgaagattactgacgaagtcttaaagaccatcgagacgttgtcgttcttagctccgttacacaatccagcgaacattatgggtatcaagagcagcatgaaattaatgccgggtgtgcctcaagttgccgtctttgatacagcgttccaccagaagatgccggagaaagcctatttgtacgcaatcccctatgagtactacgagaaatataaaattcgccgctatgggtttcatggaacctcacatcgttatgtgagtaaacgtgctgcggaaattatgggcaaaccgtacgatcagctcaagatcattaccgttcacgtgggtaacggcgcatcagttgcggcggtgaagaatggcgtatctgttgacacttccatgggtttcacaccacttgaaggtcttgtcatgggcacgcgcagcggcgatattgatccggccatcgtggaatttcttgagaaagaagaaggattgtcggccaaagaagtcgtcaacatcctcaacaagaaatctggtgtgtatgggctcaccaaaggctttagtagtgacatgcgtgacattgaagataatgctattgaaggtgatcctgtatgccgccttgcattcgatgtgtacgaatatcgtatcgcgaaatatattggcgcatacgctgcggccatgaacggtgttgacgcgatcgtctttaccgcaggagttggcgaaaatagcagcattatgcgcgaagaaattattgagaactacttgggctacttagggatcaagatcgataaagaagccaatgacttcaaaggtgaggagaagatcatttcaacgcccgattccaaagtgattgcgatggtagttccgaccaacgaggagctcatgatcgccaaagacacgaaagaaatcattgagaaagggttggacgagcttaagatc

SEQ ID NO: 226 - protein, 417 aa, synthetic construct
  REGION 1..417: note = Variant of acetate kinase
MHHHHHHGGSGMKVLVINSGSSSIKYQLLDMTNEKVLAKGLVERIGIDGSRIVHKVNGEKHVLEHEIKNHEIGLKLVLDLLTDEKYGVLKDLKEIDAVGHRVVHGGERFASSVKITDEVLKTIETLSFLAPLHNPANIMGIKSSMKLMPGVPQVAVFDTAFHQKMPEKAYLYAIPYEYYEKYKIRRYGFHGTSHRYVSKRAAEIMGKPYDQLKIITVHVGNGASVAAVKNGVSVDTSMGFTPLEGLVMGTRSGDIDPAIVEFLEKEEGLSAKEVVNILNKKSGVYGLTKGFSSDMRDIEDNAIEGDPVCRLAFDVYEYRIAKYIGAYAAAMNGVDAIVFTAGVGENSSIMREEIIENYLGYLGIKIDKEANDFKGEEKIISTPDSKVIAMVVPTNEELMIAKDTKEIIEKGLDELKI

SEQ ID NO: 227 - DNA, 1251 bp, synthetic construct
  misc_feature 1..1251: note = Variant of acetate kinase
  source 1..1251: mol_type = other DNA
atgcaccatcatcatcatcatggcggtagcggcatgaaagttctggtgattaattctggtagctcctccatcaaatatcagctcctcgatatgaccaacgaaaaggtattagcgaaaggcttggtcgagcgcattggcatcgacggttcgcgtattgtgcataaagttaacggcgaaaaacacgtgctggaacatgagattaagaatcacgaaattggacttaaattggtcctggatcttcttacggacgaaaaatacggtgtgttgaaggatctcaaagaaatcgatgcagttgggcatcgcgtagtacatggcggcgagcgttttgccagtagcgtgaagattactgacgaagtcttaaagaccatcgagacgttgtcgttcttagctccgttacacaatccagcgaacattatgggtatcaagagcagcatgaaattattaccgggtgtgcctcaagttgccgtctttgatacagcgttccaccagaagatgccggagaaagcctatttgtacgcaatcccctatgagtactacgagaaatataaaattcgccgctatgggtttcatggaacctcacatcgttatgtgagtaaacgtgctgcggaaattatgggcaaaccgtacgatcagctcaagatcattaccgttcacgtgggtaacggcgcatcagttgcggcggtgaagaatggcgtatctgttgacacttccatgggtttcacaccacttgaaggtcttgtcatgggcacgcgcagcggcgatattgatccggccatcgtggaatttcttgagaaagaagaaggattgtcggccaaagaagtcgtcaacatcctcaacaagaaatctggtgtgtatgggctcaccaaaggctttagtagtgacatgcgtgacattgaagataatgctattgaaggtgatcctgtatgccgccttgcattcgatgtgtacgaatatcgtatcgcgaaatatattggcgcatacgctgcggccatgaacggtgttgacgcgatcgtctttaccgcaggagttggcgaaaatagcagcattatgcgcgaagaaattattgagaactacttgggctacttagggatcaagatcgataaagaagccaatcgcttcaaaggtgaggagaagatcatttcaacgcccgattccaaagtgattgcgatggtaattccgaccaacgaggagctcatgatcgccaaagacacgaaagaaatcattgagaaagggttggacgagcttaagatc

SEQ ID NO: 228 - protein, 417 aa, synthetic construct
  REGION 1..417: note = Variant of acetate kinase
MHHHHHHGGSGMKVLVINSGSSSIKYQLLDMTNEKVLAKGLVERIGIDGSRIVHKVNGEKHVLEHEIKNHEIGLKLVLDLLTDEKYGVLKDLKEIDAVGHRVVHGGERFASSVKITDEVLKTIETLSFLAPLHNPANIMGIKSSMKLLPGVPQVAVFDTAFHQKMPEKAYLYAIPYEYYEKYKIRRYGFHGTSHRYVSKRAAEIMGKPYDQLKIITVHVGNGASVAAVKNGVSVDTSMGFTPLEGLVMGTRSGDIDPAIVEFLEKEEGLSAKEVVNILNKKSGVYGLTKGFSSDMRDIEDNAIEGDPVCRLAFDVYEYRIAKYIGAYAAAMNGVDAIVFTAGVGENSSIMREEIIENYLGYLGIKIDKEANRFKGEEKIISTPDSKVIAMVIPTNEELMIAKDTKEIIEKGLDELKI

SEQ ID NO: 229 - DNA, 1251 bp, synthetic construct
  misc_feature 1..1251: note = Variant of acetate kinase
  source 1..1251: mol_type = other DNA
atgcaccatcatcatcatcatggcggtagcggcatgaaagttctggtgattaattctggtagctcctccatcaaatatcagctcctcgatatgaccaacgaaaaggtattagcgaaaggcttggtcgagcgcattggcatcgacggttcgcgtcttgtgcataaagttaacggcgaaaaacacgtgctggaacatgagattaagaatcacgaaattggacttaaattggtcctggatcttcttacggacgaaaaatacggtgtgttgaaggatctcaaagaaatcgatgcagttgggcatcgcgtagtacatggcggcgagcgttttgccagtagcgtgaagattactgacgaagtcttaaagaccatcgagacgttgtcgttcttagctccgttacacaatccagcgaacattatgggtatcaagagcagcatgaaattactgccgggtgtgcctcaagttgccgtctttgatacagcgttccaccagaagatgccggagaaagcctatttgtacgcaatcccctatgagtactacgagaaatataaaattcgccgctatgggtttcatggaacctcacatcgttatgtgagtaaacgtgctgcggaaattatgggcaaaccgtacgatcagctcaagatcattaccgttcacgtgggtaacggcgcatcagttgcggcggtgaagaatggcgtatctgttgacacttccatgggtttcacaccacttgaaggtcttgtcatgggcacgcgcagcggcgatattgatccggccatcgtggaatttcttgagaaagaagaaggattgtcggccaaagaagtcgtcaacatcctcaacaagaaatctggtgtgtatgggctcaccaaaggctttagtagtgacatgcgtgacattgaagataatgctattgaaggtgatcctgtatgccgccttgcattcgatgtgtacgaatatcgtatcgcgaaatatattggcgcatacgctgcggccatgaacggtgttgacgcgatcgtctttaccgcaggagttggcgaaaatagcagcattatgcgcgaagaaattattgagaactacttgggctacttagggatcaagatcgataaagaagccaatgatttcaaaggtgaggagaagatcatttcaacgcccgattccaaagtgattgcgatggtaattccgaccaacgaggagctcatgatcgccaaagacacgaaagaaatcattgagaaagggttggacgagcttaagatc

SEQ ID NO: 230 - protein, 417 aa, synthetic construct
  REGION 1..417: note = Variant of acetate kinase
MHHHHHHGGSGMKVLVINSGSSSIKYQLLDMTNEKVLAKGLVERIGIDGSRLVHKVNGEKHVLEHEIKNHEIGLKLVLDLLTDEKYGVLKDLKEIDAVGHRVVHGGERFASSVKITDEVLKTIETLSFLAPLHNPANIMGIKSSMKLLPGVPQVAVFDTAFHQKMPEKAYLYAIPYEYYEKYKIRRYGFHGTSHRYVSKRAAEIMGKPYDQLKIITVHVGNGASVAAVKNGVSVDTSMGFTPLEGLVMGTRSGDIDPAIVEFLEKEEGLSAKEVVNILNKKSGVYGLTKGFSSDMRDIEDNAIEGDPVCRLAFDVYEYRIAKYIGAYAAAMNGVDAIVFTAGVGENSSIMREEIIENYLGYLGIKIDKEANDFKGEEKIISTPDSKVIAMVIPTNEELMIAKDTKEIIEKGLDELKI

SEQ ID NO: 231 - DNA, 1251 bp, synthetic construct
  misc_feature 1..1251: note = Variant of acetate kinase
  source 1..1251: mol_type = other DNA
atgcaccatcatcatcatcatggcggtagcggcatgaaagttctggtgattaattctggtagctcctccatcaaatatcagctcctcgatatgaccaacgaaaaggtattagcgaaaggcttggtcgagcgcattggcatcgacggttcgcgtattgtgcataaagttaacggcgaaaaacacgtgctggaacatgagattaagaatcacgaaattggacttaaattggtcctggatcttcttacggacgaaaaatacggtgtgttgaaggatctcaaagaaatcgatgcagttgggcatcgcgtagtacatggcggcgagcgttttgccagtagcgtgaagattactgacgaagtcttaaagaccatcgagacgttgtcgttcttagctccgttacacaatccactgaacattatgggtatcaagagcagcatgaaattattaccgggtgtgcctcaagttgccgtctttgatacagcgttccaccagaagatgccggagaaagcctatttgtacgcaatcccctatgagtactacgagaaatataaaattcgccgctatgggtttcatggaacctcacatcgttatgtgagtaaacgtgctgcggaaattatgggcaaaccgtacgatcagctcaagatcattaccgttcacgtgggtaacggcgcatcagttgcggcggtgaagaatggcgtatctgttgacacttccatgggtttcacaccacttgaaggtcttgtcatgggcacgcgcagcggcgatattgatccggccatcgtggaatttcttgagaaagaagaaggattgtcggccaaagaagtcgtcaacatcctcaacaagaaatctggtgtgtatgggctcaccaaaggctttagtagtgacatgcgtgacattgaagataatgctattgaaggtgatcctgtatgccgccttgcattcgatgtgtacgaatatcgtatcgcgaaatatattggcgcatacgctgcggccatgaacggtgttgacgcgatcgtctttaccgcaggagttggcgaaaatagcagcattatgcgcgaagaaattattgagaactacttgggctacttagggatcaagatcgataaagaagccaatgatttcaaaggtgaggagaagatcatttcaacgcccgattccaaagtgattgcgatggtagttccgaccaacgaggagctcatgatcgccaaagacacgaaagaaatcattgagaaagggttggacgagcttaagatc

SEQ ID NO: 232 - protein, 417 aa, synthetic construct
  REGION 1..417: note = Variant of acetate kinase
MHHHHHHGGSGMKVLVINSGSSSIKYQLLDMTNEKVLAKGLVERIGIDGSRIVHKVNGEKHVLEHEIKNHEIGLKLVLDLLTDEKYGVLKDLKEIDAVGHRVVHGGERFASSVKITDEVLKTIETLSFLAPLHNPLNIMGIKSSMKLLPGVPQVAVFDTAFHQKMPEKAYLYAIPYEYYEKYKIRRYGFHGTSHRYVSKRAAEIMGKPYDQLKIITVHVGNGASVAAVKNGVSVDTSMGFTPLEGLVMGTRSGDIDPAIVEFLEKEEGLSAKEVVNILNKKSGVYGLTKGFSSDMRDIEDNAIEGDPVCRLAFDVYEYRIAKYIGAYAAAMNGVDAIVFTAGVGENSSIMREEIIENYLGYLGIKIDKEANDFKGEEKIISTPDSKVIAMVVPTNEELMIAKDTKEIIEKGLDELKI

SEQ ID NO: 233 - DNA, 1251 bp, synthetic construct
  misc_feature 1..1251: note = Variant of acetate kinase
  source 1..1251: mol_type = other DNA
atgcaccatcatcatcatcatggcggtagcggcatgaaagttctggtgattaattctggtagctcctccatcaaatatcagctcctcgatatgaccaacgaaaaggtattagcgaaaggcttggtcgagcgcattggcatcgacggttcgcgtattgtgcataaagttaacggcgaaaaacacgtgctggaacatgagattaagaatcacgaaattggacttaaattggtcctggatcttcttacggacgaaaaatacggtgtgttgaaggatctcaaagaaatcgatgcagttgggcatcgcgtagtacatggcggcgagcgttttgccagtagcgtgaagattactgacgaagtcttaaagaccatcgagacgttgtcgttcttagctccgttacacaatccagcgaacattatgggtatcaagagcagcatgaaattattaccgggtgtgcctcaagttgccgtctttgatacagcgttccaccagaagatgccggagaaagcctatttgtacgcaatcccctatgagtactacgagaaatataaaattcgccgctatgggtttcatggaacctcacatcgttatgtgagtaaacgtgctgcggaaattatgggcaaaccgtacgatcagctcaagatcattaccgttcacgtgggtaacggcgcatcagttgcggcggtgaagaatggcgtatctgttgacacttccatgggtttcacaccacttgaaggtcttgtcatgggcacgcgcagcggcgatattgatccggccatcgtggaatttcttgagaaagaagaaggattgtcggccaaagaagtcgtcaacatcctcaacaagaaatctggtgtgtatgggctcaccaaaggctttagtagtgacatgcgtgacattgaagataatgctattgaaggtgatcctgtatgccgccttgcattcgatgtgtacgaatatcgtatcgcgaaatatattggcgcatacgctgcggccatgaacggtgttgacgcgatcgtctttaccgcaggagttggcgaaaatagcagcattatgcgcgaagaaattattgagaactacttgggctacttagggatcaagatcgataaagaagccaatcgcttcaaaggtgaggagaagatcatttcaacgcccgattccaaagtgattgcgatggtagttccgaccaacgaggagctcatgatcgccaaagacacgaaagaaatcattgagaaagggttggacgagcttaagatc

SEQ ID NO: 234 - protein, 417 aa, synthetic construct
  REGION 1..417: note = Variant of acetate kinase
MHHHHHHGGSGMKVLVINSGSSSIKYQLLDMTNEKVLAKGLVERIGIDGSRIVHKVNGEKHVLEHEIKNHEIGLKLVLDLLTDEKYGVLKDLKEIDAVGHRVVHGGERFASSVKITDEVLKTIETLSFLAPLHNPANIMGIKSSMKLLPGVPQVAVFDTAFHQKMPEKAYLYAIPYEYYEKYKIRRYGFHGTSHRYVSKRAAEIMGKPYDQLKIITVHVGNGASVAAVKNGVSVDTSMGFTPLEGLVMGTRSGDIDPAIVEFLEKEEGLSAKEVVNILNKKSGVYGLTKGFSSDMRDIEDNAIEGDPVCRLAFDVYEYRIAKYIGAYAAAMNGVDAIVFTAGVGENSSIMREEIIENYLGYLGIKIDKEANRFKGEEKIISTPDSKVIAMVVPTNEELMIAKDTKEIIEKGLDELKI

SEQ ID NO: 235 - DNA, 1251 bp, synthetic construct
  misc_feature 1..1251: note = Variant of acetate kinase
  source 1..1251: mol_type = other DNA
atgcaccatcatcatcatcatggcggtagcggcatgaaagttctggtgattaattctggtagctcctccatcaaatatcagctcctcgatatgaccaacgaaaaggtattagcgaaaggcttggtcgagcgcattggcatcgacggttcgcgtattgtgcataaagttaacggcgaaaaacacgtgctggaacatgagattaaggatcacgaaattggacttaaattggtcctggatcttcttacggacgaaaaatacggtgtgttgaaggatctcaaagaaatcgatgcagttgggcatcgcgtagtacatggcggcgagcgttttgccagtagcgtgaagattactgacgaagtcttaaagaccatcgagacgttgtcgttcttagctccgttacacaatccactgaacattatgggtatcaagagcagcatgaaattactgccgggtgtgcctcaagttgccgtctttgatacagcgttccaccagaagatgccggagaaagcctatttgtacgcaatcccctatgagtactacgagaaatataaaattcgccgctatgggtttcatggaacctcacatcgttatgtgagtaaacgtgctgcggaaattatgggcaaaccgtacgatcagctcaagatcattaccgttcacgtgggtaacggcgcatcagttgcggcggtgaagaatggcgtatctgttgacacttccatgggtttcacaccacttgaaggtcttgtcatgggcacgcgcagcggcgatattgatccggccatcgtggaatttcttgagaaagaagaaggattgtcggccaaagaagtcgtcaacatcctcaacaagaaatctggtgtgtatgggctcaccaaaggctttagtagtgacatgcgtgacattgaagataatgctattgaaggtgatcctgtatgccgccttgcattcgatgtgtacgaatatcgtatcgcgaaatatattggcgcatacgctgcggccatgaacggtgttgacgcgatcgtctttaccgcaggagttggcgaaaatagcagcattatgcgcgaagaaattattgagaactacttgggctacttagggatcaagatcgataaagaagccaatgatttcaaaggtgaggagaagatcatttcaacgcccgattccaaagtgattgcgatggtagttccgaccaacgaggagctcatgatcgccaaagacacgaaagaaatcattgagaaagggttggacgagcttaagatc

SEQ ID NO: 236 - protein, 417 aa, synthetic construct
  REGION 1..417: note = Variant of acetate kinase
MHHHHHHGGSGMKVLVINSGSSSIKYQLLDMTNEKVLAKGLVERIGIDGSRIVHKVNGEKHVLEHEIKDHEIGLKLVLDLLTDEKYGVLKDLKEIDAVGHRVVHGGERFASSVKITDEVLKTIETLSFLAPLHNPLNIMGIKSSMKLLPGVPQVAVFDTAFHQKMPEKAYLYAIPYEYYEKYKIRRYGFHGTSHRYVSKRAAEIMGKPYDQLKIITVHVGNGASVAAVKNGVSVDTSMGFTPLEGLVMGTRSGDIDPAIVEFLEKEEGLSAKEVVNILNKKSGVYGLTKGFSSDMRDIEDNAIEGDPVCRLAFDVYEYRIAKYIGAYAAAMNGVDAIVFTAGVGENSSIMREEIIENYLGYLGIKIDKEANDFKGEEKIISTPDSKVIAMVVPTNEELMIAKDTKEIIEKGLDELKI

SEQ ID NO: 237 - DNA, 1251 bp, synthetic construct
  misc_feature 1..1251: note = Variant of acetate kinase
  source 1..1251: mol_type = other DNA
atgcaccatcatcatcatcatggcggtagcggcatgaaagttctggtgattaattctggtagctcctccatcaaatatcagctcctcgatatgaccaacgaaaaggtattagcgaaaggcttggtcgagcgcattggcatcgacggttcgcgtatcgtgcataaagttaacggcgaaaaacacgtgctggaacatgagattaaaaatcacgaaattggacttaaattggtcctggatcttcttacggacgaaaaatacggtgtgttgaaggatctcaaagaaatcgatgcagttgggcatcgcgtagtacatggcggcgagcgttttgccagtagcgtgaagattactgacgaagtcttaaagaccatcgagacgttgtcgttcttagctccgttacacaatccagtgaacattatgggtatcaagagcagcatgaaattattaccgggtgtgcctcaagttgccgtctttgatacagcgttccaccagaagatgccggagaaagcctatttgtacgcaatcccctatgagtactacgagaaatataaaattcgccgctatgggtttcatggaacctcacatcgttatgtgagtaaacgtgctgcggaaattatgggcaaaccgtacgatcagctcaagatcattaccgttcacgtgggtaacggcgcatcagttgcggcggtgaagaatggcgtatctgttgacacttccatgggtttcacaccacttgaaggtcttgtcatgggcacgcgcagcggcgatattgatccggccatcgtggaatttcttgagaaagaagaaggattgtcggccaaagaagtcgtcaacatcctcaacaagaaatctggtgtgtatgggctcaccaaaggctttagtagtgacatgcgtgacattgaagataatgctattgaaggtgatcctgtatgccgccttgcattagatgtgtacgaatatcgtatcgcgaaatatattggcgcatacgctgcggccatgaacggtgttgacgcgatcgtctttaccgcaggagttggcgaaaatagcccgattatgcgccatgaaattattgagaactacttgggctacttagggatcaagatcgataaagaagccaatgacgttaaaggtgaggagaagatcatttcaacgcccgattccaaagtgattgcgatggtagttccgaccaacgaggagctcatgatcgccaaagacacgaaagaaatcgttgagaaagggttggacgagcttaagatc

SEQ ID NO: 238 - protein, 417 aa, synthetic construct
  REGION 1..417: note = Variant of acetate kinase
MHHHHHHGGSGMKVLVINSGSSSIKYQLLDMTNEKVLAKGLVERIGIDGSRIVHKVNGEKHVLEHEIKNHEIGLKLVLDLLTDEKYGVLKDLKEIDAVGHRVVHGGERFASSVKITDEVLKTIETLSFLAPLHNPVNIMGIKSSMKLLPGVPQVAVFDTAFHQKMPEKAYLYAIPYEYYEKYKIRRYGFHGTSHRYVSKRAAEIMGKPYDQLKIITVHVGNGASVAAVKNGVSVDTSMGFTPLEGLVMGTRSGDIDPAIVEFLEKEEGLSAKEVVNILNKKSGVYGLTKGFSSDMRDIEDNAIEGDPVCRLALDVYEYRIAKYIGAYAAAMNGVDAIVFTAGVGENSPIMRHEIIENYLGYLGIKIDKEANDVKGEEKIISTPDSKVIAMVVPTNEELMIAKDTKEIVEKGLDELKI

SEQ ID NO: 239 - DNA, 1251 bp, synthetic construct
  misc_feature 1..1251: note = Variant of acetate kinase
  source 1..1251: mol_type = other DNA
atgcaccatcatcatcatcatggcggtagcggcatgaaagttctggtgattaattctggtagctcctccatcaaatatcagctcctcgatatgaccaacgaaaaggtattagcgaaaggcttggtcgagcgcattggcatcgacggttcgcgtatcgtgcataaagttaacggcgaaaaacacgtgctggaacatgagattaagaatcacgaaattggacttaaattggtcctggatcttcttacggacgaaaaatacggtgtgttgaaggatctcaaagaaatcgatgcagttgggcatcgcgtagtacatggcggcgagcgttttgccagtagcgtgaagattactgacgaagtcttaaagaccatcgagacgttgtcgttcttagctccgttacacaatccagcgaacattatgggtatcaagagcagcatgaaagtgttaccgggtgtgcctcaagttgccgtctttgatacagcgttccaccagaagatgccggagaaagcctatttgtacgcaatcccctatgagtactacgagaaatataaaattcgccgctatgggtttcatggaacctcacatcgttatgtgagtaaacgtgctgcggaaattatgggcaaaccgtacgatcagctcaagatcattaccgttcacgtgggtaacggcgcatcagttgcggcggtgaagaatggcgtatctgttgacacttccatgggtttcacaccacttgaaggtcttgtcatgggcacgcgcagcggcgatattgatccggccatcgtggaatttcttgagaaagaagaaggattgtcggccaaagaagtcgtcaacatcctcaacaagaaatctggtgtgtatgggctcaccaaaggctttagtagtgacatgcgtgacattgaagataatgctattgaaggtgatcctgtatgccgccttgcattagatgtgtacgaatatcgtatcgcgaaatatattggcgcatacgctgcggccatgaacggtgttgacgcgatcgtctttaccgcaggagttggcgaaaatagcccgattatgcgccatgaaattattgagaactacttgggctacttagggatcaagatcgataaagaagccaatgacttcaaaggtgaggagaagatcatttcaacgcccgattccaaagtgattgcgatggtagttccgaccaacgaggagctcatgatcgccaaagacacgaaagaaatcgttgagaaagggttggacgagcttaagatc

SEQ ID NO: 240 - protein, 417 aa, synthetic construct
  REGION 1..417: note = Variant of acetate kinase
MHHHHHHGGSGMKVLVINSGSSSIKYQLLDMTNEKVLAKGLVERIGIDGSRIVHKVNGEKHVLEHEIKNHEIGLKLVLDLLTDEKYGVLKDLKEIDAVGHRVVHGGERFASSVKITDEVLKTIETLSFLAPLHNPANIMGIKSSMKVLPGVPQVAVFDTAFHQKMPEKAYLYAIPYEYYEKYKIRRYGFHGTSHRYVSKRAAEIMGKPYDQLKIITVHVGNGASVAAVKNGVSVDTSMGFTPLEGLVMGTRSGDIDPAIVEFLEKEEGLSAKEVVNILNKKSGVYGLTKGFSSDMRDIEDNAIEGDPVCRLALDVYEYRIAKYIGAYAAAMNGVDAIVFTAGVGENSPIMRHEIIENYLGYLGIKIDKEANDFKGEEKIISTPDSKVIAMVVPTNEELMIAKDTKEIVEKGLDELKI

SEQ ID NO: 241 - DNA, 1251 bp, synthetic construct
  misc_feature 1..1251: note = Variant of acetate kinase
  source 1..1251: mol_type = other DNA
atgcaccatcatcatcatcatggcggtagcggcatgaaagttctggtgattaattctggtagctcctccatcaaatatcagctcctcgatatgaccaacgaaaaggtattagcgaaaggcttggtcgagcgcattggcatcgacggttcgcgtcttgtgcataaagttaacggcgaaaaacacgtgctggaacatgagattaagaatcacgaaattggacttaaattggtcctggatcttcttacggacgaaaaatacggtgtgttgaaggatctcaaagaaatcgatgcagttgggcatcgcgtagtacatggcggcgagcgttttgccagtagcgtgaagattactgacgaagtcttaaagaccatcgagacgttgtcgttcttagctccgttacacaatccagcgaacattatgggtatcaagagcagcatgaaattaatgccgggtgtgcctcaagttgccgtctttgatacagcgttccaccagaagatgccggagaaagcctatttgtacgcaatcccctatgagtactacgagaaatataaaattcgccgctatgggtttcatggaacctcacatcgttatgtgagtaaacgtgctgcggaaattatgggcaaaccgtacgatcagctcaagatcattaccgttcacgtgggtaacggcgcatcagttgcggcggtgaagaatggcgtatctgttgacacttccatgggtttcacaccacttgaaggtcttgtcatgggcacgcgcagcggcgatattgatccggccatcgtggaatttcttgagaaagaagaaggattgtcggccaaagaagtcgtcaacatcctcaacaagaaatctggtgtgtatgggctcaccaaaggctttagtagtgacatgcgtgacattgaagataatgctattgaaggtgatcctgtatgccgccttgcattcgatgtgtacgaatatcgtatcgcgaaatatattggcgcatacgctgcggccatgaacggtgttgacgcgatcgtctttaccgcaggagttggcgaaaatagcagcattatgcgcgaagaaattattgagaactacttgggctacttagggatcaagatcgataaagaagccaatgacttcaaaggtgaggagaagatcatttcaacgcccgattccaaagtgattgcgatggtagttccgaccaacgaggagctcatgatcgccaaagacacgaaagaaatcattgagaaagggttggacgagcttaagatc

SEQ ID NO: 242 - protein, 417 aa, synthetic construct
  REGION 1..417: note = Variant of acetate kinase
MHHHHHHGGSGMKVLVINSGSSSIKYQLLDMTNEKVLAKGLVERIGIDGSRLVHKVNGEKHVLEHEIKNHEIGLKLVLDLLTDEKYGVLKDLKEIDAVGHRVVHGGERFASSVKITDEVLKTIETLSFLAPLHNPANIMGIKSSMKLMPGVPQVAVFDTAFHQKMPEKAYLYAIPYEYYEKYKIRRYGFHGTSHRYVSKRAAEIMGKPYDQLKIITVHVGNGASVAAVKNGVSVDTSMGFTPLEGLVMGTRSGDIDPAIVEFLEKEEGLSAKEVVNILNKKSGVYGLTKGFSSDMRDIEDNAIEGDPVCRLAFDVYEYRIAKYIGAYAAAMNGVDAIVFTAGVGENSSIMREEIIENYLGYLGIKIDKEANDFKGEEKIISTPDSKVIAMVVPTNEELMIAKDTKEIIEKGLDELKI

SEQ ID NO: 243 - DNA, 1251 bp, synthetic construct
  misc_feature 1..1251: note = Variant of acetate kinase
  source 1..1251: mol_type = other DNA
atgcaccatcatcatcatcatggcggtagcggcatgaaagttctggtgattaattctggtagctcctccatcaaatatcagctcctcgatatgaccaacgaaaaggtattagcgaaaggcttggtcgagcgcattggcatcgacggttcgcgtattgtgcataaagttaacggcgaaaaacacgtgctggaacatgagattaagaatcacgaaattggacttaaattggtcctggatcttcttacggacgaaaaatacggtgtgttgaaggatctcaaagaaatcgatgcagttgggcatcgcgtagtacatggcggcgagcgttttgccagtagcgtgaagattactgacgaagtcttaaagaccatcgagacgttgtcgttcttagctccgttacacaatccagcgaacattatgggtatcaagagcagcatgaaattaatgccgggtgtgcctcaagttgccgtctttgatacagcgttccaccagaagatgccggagaaagcctatttgtacgcaatcccctatgagtactacgagaaatataaaattcgccgctatgggtttcatggaacctcacatcgttatgtgagtaaacgtgctgcggaaattatgggcaaaccgtacgatcagctcaagatcattaccgttcacgtgggtaacggcgcatcagttgcggcggtgaagaatggcgtatctgttgacacttccatgggtttcacaccacttgaaggtcttgtcatgggcacgcgcagcggcgatattgatccggccatcgtggaatttcttgagaaagaagaaggattgtcggccaaagaagtcgtcaacatcctcaacaagaaatctggtgtgtatgggctcaccaaaggctttagtagtgacatgcgtgacattgaagataatgctattgaaggtgatcctgtatgccgccttgcattcgatgtgtacgaatatcgtatcgcgaaatatattggcgcatacgctgcggccatgaacggtgttgacgcgatcgtctttaccgcaggagttggcgaaaatagccgcattatgcgcgaagaaattattgagaactacttgggctacttagggatcaagatcgataaagaagccaatcgcttcaaaggtgaggagaagatcatttcaacgcccgattccaaagtgattgcgatggtagttccgaccaacgaggagctcatgatcgccaaagacacgaaagaaatcattgagaaagggttggacgagcttaagatc

SEQ ID NO: 244 - protein, 417 aa, synthetic construct
  REGION 1..417: note = Variant of acetate kinase
MHHHHHHGGSGMKVLVINSGSSSIKYQLLDMTNEKVLAKGLVERIGIDGSRIVHKVNGEKHVLEHEIKNHEIGLKLVLDLLTDEKYGVLKDLKEIDAVGHRVVHGGERFASSVKITDEVLKTIETLSFLAPLHNPANIMGIKSSMKLMPGVPQVAVFDTAFHQKMPEKAYLYAIPYEYYEKYKIRRYGFHGTSHRYVSKRAAEIMGKPYDQLKIITVHVGNGASVAAVKNGVSVDTSMGFTPLEGLVMGTRSGDIDPAIVEFLEKEEGLSAKEVVNILNKKSGVYGLTKGFSSDMRDIEDNAIEGDPVCRLAFDVYEYRIAKYIGAYAAAMNGVDAIVFTAGVGENSRIMREEIIENYLGYLGIKIDKEANRFKGEEKIISTPDSKVIAMVVPTNEELMIAKDTKEIIEKGLDELKI

SEQ ID NO: 245 - DNA, 1251 bp, synthetic construct
  misc_feature 1..1251: note = Variant of acetate kinase
  source 1..1251: mol_type = other DNA
atgcaccatcatcatcatcatggcggtagcggcatgaaagttctggtgattaattctggtagctcctccatcaaatatcagctcctcgatatgaccaacgaaaaggtattagcgaaaggcttggtcgagcgcattggcatcgacggttcgcgtattgtgcataaagttaacggcgaaaaacacgtgctggaacatgagattaagaatcacgaaattggacttaaattggtcctggatcttcttacggacgaaaaatacggtgtgttgaaggatctcaaagaaatcgatgcagttgggcatcgcgtagtacatggcggcgagcgttttgccagtagcgtgaagattactgacgaagtcttaaagaccatcgagacgttgtcgttcttagctccgttacacaatccagcgaacattatgggtatcaagagcagcatgaaattaatgccgggtgtgcctcaagttgccgtctttgatacagcgttccaccagaagatgccggagaaagcctatttgtacgcaatcccctatgagtactacgagaaatataaaattcgccgctatgggtttcatggaacctcacatcgttatgtgagtaaacgtgctgcggaaattatgggcaaaccgtacgatcagctcaagatcattaccgttcacgtgggtaacggcgcatcagttgcggcggtgaagaatggcgtatctgttgacacttccatgggtttcacaccacttgaaggtcttgtcatgggcacgcgcagcggcgatattgatccggccatcgtggaatttcttgagaaagaagaaggattgtcggccaaagaagtcgtcaacatcctcaacaagaaatctggtgtgtatgggctcaccaaaggctttagtagtgacatgcgtgacattgaagataatgctattgaaggtgatcctgtatgccgccttgcattcgatgtgtacgaatatcgtatcgcgaaatatattggcgcatacgctgcggccatgaacggtgttgacgcgatcgtctttaccgcaggagttggcgaaaatagccgcattatgcgcgaagaaattattgagaactacttgggctacttagggatcaagatcgataaagaagccaatgacttcaaaggtgaggagaagatcatttcaacgcccgattccaaagtgattgcgatggtagttccgaccaacgaggagctcatgatcgccaaagacacgaaagaaatcattgagaaagggttggacgagcttaagatc

SEQ ID NO: 246 - protein, 417 aa, synthetic construct
  REGION 1..417: note = Variant of acetate kinase
MHHHHHHGGSGMKVLVINSGSSSIKYQLLDMTNEKVLAKGLVERIGIDGSRIVHKVNGEKHVLEHEIKNHEIGLKLVLDLLTDEKYGVLKDLKEIDAVGHRVVHGGERFASSVKITDEVLKTIETLSFLAPLHNPANIMGIKSSMKLMPGVPQVAVFDTAFHQKMPEKAYLYAIPYEYYEKYKIRRYGFHGTSHRYVSKRAAEIMGKPYDQLKIITVHVGNGASVAAVKNGVSVDTSMGFTPLEGLVMGTRSGDIDPAIVEFLEKEEGLSAKEVVNILNKKSGVYGLTKGFSSDMRDIEDNAIEGDPVCRLAFDVYEYRIAKYIGAYAAAMNGVDAIVFTAGVGENSRIMREEIIENYLGYLGIKIDKEANDFKGEEKIISTPDSKVIAMVVPTNEELMIAKDTKEIIEKGLDELKI

SEQ ID NO: 247 - DNA, 1251 bp, synthetic construct
  misc_feature 1..1251: note = Variant of acetate kinase
  source 1..1251: mol_type = other DNA
atgcaccatcatcatcatcatggcggtagcggcatgaaagttctggtgattaattctggtagctcctccatcaaatatcagctcctcgatatgaccaacgaaaaggtattagcgaaaggcttggtcgagcgcattggcatcgacggttcgcgtcttgtgcataaagttaacggcgaaaaacacgtgctggaacatgagattaagaatcacgaaattggacttaaattggtcctggatcttcttacggacgaaaaatacggtgtgttgaaggatctcaaagaaatcgatgcagttgggcatcgcgtagtacatggcggcgagcgttttgccagtagcgtgaagattactgacgaagtcttaaagaccatcgagacgttgtcgttcttagctccgttacacaatccactgaacattatgggtatcaagagcagcatgaaattattaccgggtgtgcctcaagttgccgtctttgatacagcgttccaccagaagatgccggagaaagcctatttgtacgcaatcccctatgagtactacgagaaatataaaattcgccgctatgggtttcatggaacctcacatcgttatgtgagtaaacgtgctgcggaaattatgggcaaaccgtacgatcagctcaagatcattaccgttcacgtgggtaacggcgcatcagttgcggcggtgaagaatggcgtatctgttgacacttccatgggtttcacaccacttgaaggtcttgtcatgggcacgcgcagcggcgatattgatccggccatcgtggaatttcttgagaaagaagaaggattgtcggccaaagaagtcgtcaacatcctcaacaagaaatctggtgtgtatgggctcaccaaaggctttagtagtgacatgcgtgacattgaagataatgctattgaaggtgatcctgtatgccgccttgcattcgatgtgtacgaatatcgtatcgcgaaatatattggcgcatacgctgcggccatgaacggtgttgacgcgatcgtctttaccgcaggagttggcgaaaatagcagcattatgcgcgaagaaattattgagaactacttgggctacttagggatcaagatcgataaagaagccaatgatttcaaaggtgaggagaagatcatttcaacgcccgattccaaagtgattgcgatggtagttccgaccaacgaggagctcatgatcgccaaagacacgaaagaaatcattgagaaagggttggacgagcttaagatc

SEQ ID NO: 248 - protein, 417 aa, synthetic construct
  REGION 1..417: note = Variant of acetate kinase
MHHHHHHGGSGMKVLVINSGSSSIKYQLLDMTNEKVLAKGLVERIGIDGSRLVHKVNGEKHVLEHEIKNHEIGLKLVLDLLTDEKYGVLKDLKEIDAVGHRVVHGGERFASSVKITDEVLKTIETLSFLAPLHNPLNIMGIKSSMKLLPGVPQVAVFDTAFHQKMPEKAYLYAIPYEYYEKYKIRRYGFHGTSHRYVSKRAAEIMGKPYDQLKIITVHVGNGASVAAVKNGVSVDTSMGFTPLEGLVMGTRSGDIDPAIVEFLEKEEGLSAKEVVNILNKKSGVYGLTKGFSSDMRDIEDNAIEGDPVCRLAFDVYEYRIAKYIGAYAAAMNGVDAIVFTAGVGENSSIMREEIIENYLGYLGIKIDKEANDFKGEEKIISTPDSKVIAMVVPTNEELMIAKDTKEIIEKGLDELKI

SEQ ID NO: 249 - DNA, 1251 bp, synthetic construct
  misc_feature 1..1251: note = Variant of acetate kinase
  source 1..1251: mol_type = other DNA
atgcaccatcatcatcatcatggcggtagcggcatgaaagttctggtgattaattctggtagctcctccatcaaatatcagctcctcgatatgaccaacgaaaaggtattagcgaaaggcttggtcgagcgcattggcatcgacggttcgcgtcttgtgcataaagttaacggcgaaaaacacgtgctggaacatgagattaaggatcacgaaattggacttaaattggtcctggatcttcttacggacgaaaaatacggtgtgttgaaggatctcaaagaaatcgatgcagttgggcatcgcgtagtacatggcggcgagcgttttgccagtagcgtgaagattactgacgaagtcttaaagaccatcgagacgttgtcgttcttagctccgttacacaatccagcgaacattatgggtatcaagagcagcatgaaattattaccgggtgtgcctcaagttgccgtctttgatacagcgttccaccagaagatgccggagaaagcctatttgtacgcaatcccctatgagtactacgagaaatataaaattcgccgctatgggtttcatggaacctcacatcgttatgtgagtaaacgtgctgcggaaattatgggcaaaccgtacgatcagctcaagatcattaccgttcacgtgggtaacggcgcatcagttgcggcggtgaagaatggcgtatctgttgacacttccatgggtttcacaccacttgaaggtcttgtcatgggcacgcgcagcggcgatattgatccggccatcgtggaatttcttgagaaagaagaaggattgtcggccaaagaagtcgtcaacatcctcaacaagaaatctggtgtgtatgggctcaccaaaggctttagtagtgacatgcgtgacattgaagataatgctattgaaggtgatcctgtatgccgccttgcattcgatgtgtacgaatatcgtatcgcgaaatatattggcgcatacgctgcggccatgaacggtgttgacgcgatcgtctttaccgcaggagttggcgaaaatagccgcattatgcgcgaagaaattattgagaactacttgggctacttagggatcaagatcgataaagaagccaatcgcttcaaaggtgaggagaagatcatttcaacgcccgattccaaagtgattgcgatggtaattccgaccaacgaggagctcatgatcgccaaagacacgaaagaaatcattgagaaagggttggacgagcttaagatc

SEQ ID NO: 250 - protein, 417 aa, synthetic construct
  REGION 1..417: note = Variant of acetate kinase
MHHHHHHGGSGMKVLVINSGSSSIKYQLLDMTNEKVLAKGLVERIGIDGSRLVHKVNGEKHVLEHEIKDHEIGLKLVLDLLTDEKYGVLKDLKEIDAVGHRVVHGGERFASSVKITDEVLKTIETLSFLAPLHNPANIMGIKSSMKLLPGVPQVAVFDTAFHQKMPEKAYLYAIPYEYYEKYKIRRYGFHGTSHRYVSKRAAEIMGKPYDQLKIITVHVGNGASVAAVKNGVSVDTSMGFTPLEGLVMGTRSGDIDPAIVEFLEKEEGLSAKEVVNILNKKSGVYGLTKGFSSDMRDIEDNAIEGDPVCRLAFDVYEYRIAKYIGAYAAAMNGVDAIVFTAGVGENSRIMREEIIENYLGYLGIKIDKEANRFKGEEKIISTPDSKVIAMVIPTNEELMIAKDTKEIIEKGLDELKI

SEQ ID NO: 251 - DNA, 1251 bp, synthetic construct
  misc_feature 1..1251: note = Variant of acetate kinase
  source 1..1251: mol_type = other DNA
atgcaccatcatcatcatcatggcggtagcggcatgaaagttctggtgattaattctggtagctcctccatcaaatatcagctcctcgatatgaccaacgaaaaggtattagcgaaaggcttggtcgagcgcattggcatcgacggttcgcgtattgtgcataaagttaacggcgaaaaacacgtgctggaacatgagattaagaatcacgaaattggacttaaattggtcctggatcttcttacggacgaaaaatacggtgtgttgaaggatctcaaagaaatcgatgcagttgggcatcgcgtagtacatggcggcgagcgttttgccagtagcgtgaagattactgacgaagtcttaaagaccatcgagacgttgtcgttcttagctccgttacacaatccagcgaacattatgggtatcaagagcagcatgaaattattaccgggtgtgcctcaagttgccgtctttgatacagcgttccaccagaagatgccggagaaagcctatttgtacgcaatcccctatgagtactacgagaaatataaaattcgccgctatgggtttcatggaacctcacatcgttatgtgagtaaacgtgctgcggaaattatgggcaaaccgtacgatcagctcaagatcattaccgttcacgtgggtaacggcgcatcagttgcggcggtgaagaatggcgtatctgttgacacttccatgggtttcacaccacttgaaggtcttgtcatgggcacgcgcagcggcgatattgatccggccatcgtggaatttcttgagaaagaagaaggattgtcggccaaagaagtcgtcaacatcctcaacaagaaatctggtgtgtatgggctcaccaaaggctttagtagtgacatgcgtgacattgaagataatgctattgaaggtgatcctgtatgccgccttgcattcgatgtgtacgaatatcgtatcgcgaaatatattggcgcatacgctgcggccatgaacggtgttgacgcgatcgtctttaccgcaggagttggcgaaaatagcagcattatgcgcgaagaaattattgagaactacttgggctacttagggatcaagatcgataaagaagccaatgatttcaaaggtgaggagaagatcatttcaacgcccgattccaaagtgattgcgatggtaattccgaccaacgaggagctcatgatcgccaaagacacgaaagaaatcattgagaaagggttggacgagcttaagatc

SEQ ID NO: 252 - protein, 417 aa, synthetic construct
  REGION 1..417: note = Variant of acetate kinase
MHHHHHHGGSGMKVLVINSGSSSIKYQLLDMTNEKVLAKGLVERIGIDGSRIVHKVNGEKHVLEHEIKNHEIGLKLVLDLLTDEKYGVLKDLKEIDAVGHRVVHGGERFASSVKITDEVLKTIETLSFLAPLHNPANIMGIKSSMKLLPGVPQVAVFDTAFHQKMPEKAYLYAIPYEYYEKYKIRRYGFHGTSHRYVSKRAAEIMGKPYDQLKIITVHVGNGASVAAVKNGVSVDTSMGFTPLEGLVMGTRSGDIDPAIVEFLEKEEGLSAKEVVNILNKKSGVYGLTKGFSSDMRDIEDNAIEGDPVCRLAFDVYEYRIAKYIGAYAAAMNGVDAIVFTAGVGENSSIMREEIIENYLGYLGIKIDKEANDFKGEEKIISTPDSKVIAMVIPTNEELMIAKDTKEIIEKGLDELKI

SEQ ID NO: 253 - DNA, 1251 bp, synthetic construct
  misc_feature 1..1251: note = Variant of acetate kinase
  source 1..1251: mol_type = other DNA
atgcaccatcatcatcatcatggcggtagcggcatgaaagttctggtgattaattctggtagctcctccatcaaatatcagctcctcgatatgaccaacgaaaaggtattagcgaaaggcttggtcgagcgcattggcatcgacggttcgcgtatcgtgcataaagttaacggcgaaaaacacgtgctggaacatgagattaagaatcacgaaattggacttaaattggtcctggatcttcttacggacgaaaaatacggtgtgttgaaggatctcaaagaaatcgatgcagttgggcatcgcgtagtacatggcggcgagcgttttgccagtagcgtgaagattactgacgaagtcttaaagaccatcgagacgttgtcgttcttagctccgttacacaatccagcgaacattatgggtatcaagagcagcatgaaagtgttaccgggtgtgcctcaagttgccgtctttgatacagcgttccaccagaagatgccggagaaagcctatttgtacgcaatcccctatgagtactacgagaaatataaaattcgccgctatgggtttcatggaacctcacatcgttatgtgagtaaacgtgctgcggaaattatgggcaaaccgtacgatcagctcaagatcattaccgttcacgtgggtaacggcgcatcagttgcggcggtgaagaatggcgtatctgttgacacttccatgggtttcacaccacttgaaggtcttgtcatgggcacgcgcagcggcgatattgatccggccatcgtggaatttcttgagaaagaagaaggattgtcggccaaagaagtcgtcaacatcctcaacaagaaatctggtgtgtatgggctcaccaaaggctttagtagtgacatgcgtgacattgaagataatgctattgaaggtgatcctgtatgccgccttgcattagatgtgtacgaatatcgtatcgcgaaatatattggcgcatacgctgcggccatgaacggtgttgacgcgatcgtctttaccgcaggagttggcgaaaatagcccgattatgcgcgaagaaattattgagaactacttgggctacttagggatcaagatcgataaagaagccaatgacttcaaaggtgaggagaagatcatttcaacgcccgattccaaagtgattgcgatggtagttccgaccaacgaggagctcatgatcgccaaagacacgaaagaaatcattgagaaagggttggacgagcttaagatc

SEQ ID NO: 254 - protein, 417 aa, synthetic construct
  REGION 1..417: note = Variant of acetate kinase
MHHHHHHGGSGMKVLVINSGSSSIKYQLLDMTNEKVLAKGLVERIGIDGSRIVHKVNGEKHVLEHEIKNHEIGLKLVLDLLTDEKYGVLKDLKEIDAVGHRVVHGGERFASSVKITDEVLKTIETLSFLAPLHNPANIMGIKSSMKVLPGVPQVAVFDTAFHQKMPEKAYLYAIPYEYYEKYKIRRYGFHGTSHRYVSKRAAEIMGKPYDQLKIITVHVGNGASVAAVKNGVSVDTSMGFTPLEGLVMGTRSGDIDPAIVEFLEKEEGLSAKEVVNILNKKSGVYGLTKGFSSDMRDIEDNAIEGDPVCRLALDVYEYRIAKYIGAYAAAMNGVDAIVFTAGVGENSPIMREEIIENYLGYLGIKIDKEANDFKGEEKIISTPDSKVIAMVVPTNEELMIAKDTKEIIEKGLDELKI

SEQ ID NO: 255 - DNA, 1251 bp, synthetic construct
  misc_feature 1..1251: note = Variant of acetate kinase
  source 1..1251: mol_type = other DNA
atgcaccatcatcatcatcatggcggtagcggcatgaaagttctggtgattaattctggtagctcctccatcaaatatcagctcctcgatatgaccaacgaaaaggtattagcgaaaggcttggtcgagcgcattggcatcgacggttcgcgtattgtgcataaagttaacggcgaaaaacacgtgctggaacatgagattaaggatcacgaaattggacttaaattggtcctggatcttcttacggacgaaaaatacggtgtgttgaaggatctcaaagaaatcgatgcagttgggcatcgcgtagtacatggcggcgagcgttttgccagtagcgtgaagattactgacgaagtcttaaagaccatcgagacgttgtcgttcttagctccgttacacaatccagcgaacattatgggtatcaagagcagcatgaaattaatgccgggtgtgcctcaagttgccgtctttgatacagcgttccaccagaagatgccggagaaagcctatttgtacgcaatcccctatgagtactacgagaaatataaaattcgccgctatgggtttcatggaacctcacatcgttatgtgagtaaacgtgctgcggaaattatgggcaaaccgtacgatcagctcaagatcattaccgttcacgtgggtaacggcgcatcagttgcggcggtgaagaatggcgtatctgttgacacttccatgggtttcacaccacttgaaggtcttgtcatgggcacgcgcagcggcgatattgatccggccatcgtggaatttcttgagaaagaagaaggattgtcggccaaagaagtcgtcaacatcctcaacaagaaatctggtgtgtatgggctcaccaaaggctttagtagtgacatgcgtgacattgaagataatgctattgaaggtgatcctgtatgccgccttgcattcgatgtgtacgaatatcgtatcgcgaaatatattggcgcatacgctgcggccatgaacggtgttgacgcgatcgtctttaccgcaggagttggcgaaaatagcccgattatgcgcgaagaaattattgagaactacttgggctacttagggatcaagatcgataaagaagccaatcgcttcaaaggtgaggagaagatcatttcaacgcccgattccaaagtgattgcgatggtaattccgaccaacgaggagctcatgatcgccaaagacacgaaagaaatcattgagaaagggttggacgagcttaagatc

SEQ ID NO: 256 - protein, 417 aa, synthetic construct
  REGION 1..417: note = Variant of acetate kinase
MHHHHHHGGSGMKVLVINSGSSSIKYQLLDMTNEKVLAKGLVERIGIDGSRIVHKVNGEKHVLEHEIKDHEIGLKLVLDLLTDEKYGVLKDLKEIDAVGHRVVHGGERFASSVKITDEVLKTIETLSFLAPLHNPANIMGIKSSMKLMPGVPQVAVFDTAFHQKMPEKAYLYAIPYEYYEKYKIRRYGFHGTSHRYVSKRAAEIMGKPYDQLKIITVHVGNGASVAAVKNGVSVDTSMGFTPLEGLVMGTRSGDIDPAIVEFLEKEEGLSAKEVVNILNKKSGVYGLTKGFSSDMRDIEDNAIEGDPVCRLAFDVYEYRIAKYIGAYAAAMNGVDAIVFTAGVGENSPIMREEIIENYLGYLGIKIDKEANRFKGEEKIISTPDSKVIAMVIPTNEELMIAKDTKEIIEKGLDELKI

SEQ ID NO: 257 - DNA, 1251 bp, synthetic construct
  misc_feature 1..1251: note = Variant of acetate kinase
  source 1..1251: mol_type = other DNA
atgcaccatcatcatcatcatggcggtagcggcatgaaagttctggtgattaattctggtagctcctccatcaaatatcagctcctcgatatgaccaacgaaaaggtattagcgaaaggcttggtcgagcgcattggcatcgacggttcgcgtatcgtgcataaagttaacggcgaaaaacacgtgctggaacatgagattaagaatcacgaaattggacttaaattggtcctggatcttcttacggacgaaaaatacggtgtgttgaaggatctcaaagaaatcgatgcagttgggcatcgcgtagtacatggcggcgagcgttttgccagtagcgtgaagattactgacgaagtcttaaagaccatcgagacgttgtcgttcttagctccgttacacaatccactgaacattatgggtatcaagagcagcatgaaattaatgccgggtgtgcctcaagttgccgtctttgatacagcgttccaccagaagatgccggagaaagcctatttgtacgcaatcccctatgagtactacgagaaatataaaattcgccgctatgggtttcatggaacctcacatcgttatgtgagtaaacgtgctgcggaaattatgggcaaaccgtacgatcagctcaagatcattaccgttcacgtgggtaacggcgcatcagttgcggcggtgaagaatggcgtatctgttgacacttccatgggtttcacaccacttgaaggtcttgtcatgggcacgcgcagcggcgatattgatccggccatcgtggaatttcttgagaaagaagaaggattgtcggccaaagaagtcgtcaacatcctcaacaagaaatctggtgtgtatgggctcaccaaaggctttagtagtgacatgcgtgacattgaagataatgctattgaaggtgatcctgtatgccgccttgcattcgatgtgtacgaatatcgtatcgcgaaatatattggcgcatacgctgcggccatgaacggtgttgacgcgatcgtctttaccgcaggagttggcgaaaatagcagcattatgcgcgaagaaattattgagaactacttgggctacttagggatcaagatcgataaagaagccaatgatttcaaaggtgaggagaagatcatttcaacgcccgattccaaagtgattgcgatggtaattccgaccaacgaggagctcatgatcgccaaagacacgaaagaaatcattgagaaagggttggacgagcttaagatc

SEQ ID NO: 258 - protein, 417 aa, synthetic construct
  REGION 1..417: note = Variant of acetate kinase
MHHHHHHGGSGMKVLVINSGSSSIKYQLLDMTNEKVLAKGLVERIGIDGSRIVHKVNGEKHVLEHEIKNHEIGLKLVLDLLTDEKYGVLKDLKEIDAVGHRVVHGGERFASSVKITDEVLKTIETLSFLAPLHNPLNIMGIKSSMKLMPGVPQVAVFDTAFHQKMPEKAYLYAIPYEYYEKYKIRRYGFHGTSHRYVSKRAAEIMGKPYDQLKIITVHVGNGASVAAVKNGVSVDTSMGFTPLEGLVMGTRSGDIDPAIVEFLEKEEGLSAKEVVNILNKKSGVYGLTKGFSSDMRDIEDNAIEGDPVCRLAFDVYEYRIAKYIGAYAAAMNGVDAIVFTAGVGENSSIMREEIIENYLGYLGIKIDKEANDFKGEEKIISTPDSKVIAMVIPTNEELMIAKDTKEIIEKGLDELKI

SEQ ID NO: 259 - DNA, 1251 bp, synthetic construct
  misc_feature 1..1251: note = Variant of acetate kinase
  source 1..1251: mol_type = other DNA
atgcaccatcatcatcatcatggcggtagcggcatgaaagttctggtgattaattctggtagctcctccatcaaatatcagctcctcgatatgaccaacgaaaaggtattagcgaaaggcttggtcgagcgcattggcatcgacggttcgcgtattgtgcataaagttaacggcgaaaaacacgtgctggaacatgagattaagaatcacgaaattggacttaaattggtcctggatcttcttacggacgaaaaatacggtgtgttgaaggatctcaaagaaatcgatgcagttgggcatcgcgtagtacatggcggcgagcgttttgccagtagcgtgaagattactgacgaagtcttaaagaccatcgagacgttgtcgttcttagctccgttacacaatccactgaacattatgggtatcaagagcagcatgaaattactgccgggtgtgcctcaagttgccgtctttgatacagcgttccaccagaagatgccggagaaagcctatttgtacgcaatcccctatgagtactacgagaaatataaaattcgccgctatgggtttcatggaacctcacatcgttatgtgagtaaacgtgctgcggaaattatgggcaaaccgtacgatcagctcaagatcattaccgttcacgtgggtaacggcgcatcagttgcggcggtgaagaatggcgtatctgttgacacttccatgggtttcacaccacttgaaggtcttgtcatgggcacgcgcagcggcgatattgatccggccatcgtggaatttcttgagaaagaagaaggattgtcggccaaagaagtcgtcaacatcctcaacaagaaatctggtgtgtatgggctcaccaaaggctttagtagtgacatgcgtgacattgaagataatgctattgaaggtgatcctgtatgccgccttgcattcgatgtgtacgaatatcgtatcgcgaaatatattggcgcatacgctgcggccatgaacggtgttgacgcgatcgtctttaccgcaggagttggcgaaaatagcccgattatgcgcgaagaaattattgagaactacttgggctacttagggatcaagatcgataaagaagccaatcgcttcaaaggtgaggagaagatcatttcaacgcccgattccaaagtgattgcgatggtagttccgaccaacgaggagctcatgatcgccaaagacacgaaagaaatcattgagaaagggttggacgagcttaagatc

SEQ ID NO: 260 - protein, 417 aa, synthetic construct
  REGION 1..417: note = Variant of acetate kinase
MHHHHHHGGSGMKVLVINSGSSSIKYQLLDMTNEKVLAKGLVERIGIDGSRIVHKVNGEKHVLEHEIKNHEIGLKLVLDLLTDEKYGVLKDLKEIDAVGHRVVHGGERFASSVKITDEVLKTIETLSFLAPLHNPLNIMGIKSSMKLLPGVPQVAVFDTAFHQKMPEKAYLYAIPYEYYEKYKIRRYGFHGTSHRYVSKRAAEIMGKPYDQLKIITVHVGNGASVAAVKNGVSVDTSMGFTPLEGLVMGTRSGDIDPAIVEFLEKEEGLSAKEVVNILNKKSGVYGLTKGFSSDMRDIEDNAIEGDPVCRLAFDVYEYRIAKYIGAYAAAMNGVDAIVFTAGVGENSPIMREEIIENYLGYLGIKIDKEANRFKGEEKIISTPDSKVIAMVVPTNEELMIAKDTKEIIEKGLDELKI

SEQ ID NO: 261 - DNA, 1251 bp, synthetic construct
  misc_feature 1..1251: note = Variant of acetate kinase
  source 1..1251: mol_type = other DNA
atgcaccatcatcatcatcatggcggtagcggcatgaaagttctggtgattaattctggtagctcctccatcaaatatcagctcctcgatatgaccaacgaaaaggtattagcgaaaggcttggtcgagcgcattggcatcgacggttcgcgtattgtgcataaagttaacggcgaaaaacacgtgctggaacatgagattaagaatcacgaaattggacttaaattggtcctggatcttcttacggacgaaaaatacggtgtgttgaaggatctcaaagaaatcgatgcagttgggcatcgcgtagtacatggcggcgagcgttttgccagtagcgtgaagattactgacgaagtcttaaagaccatcgagacgttgtcgttcttagctccgttacacaatccagcgaacattatgggtatcaagagcagcatgaaattactgccgggtgtgcctcaagttgccgtctttgatacagcgttccaccagaagatgccggagaaagcctatttgtacgcaatcccctatgagtactacgagaaatataaaattcgccgctatgggtttcatggaacctcacatcgttatgtgagtaaacgtgctgcggaaattatgggcaaaccgtacgatcagctcaagatcattaccgttcacgtgggtaacggcgcatcagttgcggcggtgaagaatggcgtatctgttgacacttccatgggtttcacaccacttgaaggtcttgtcatgggcacgcgcagcggcgatattgatccggccatcgtggaatttcttgagaaagaagaaggattgtcggccaaagaagtcgtcaacatcctcaacaagaaatctggtgtgtatgggctcaccaaaggctttagtagtgacatgcgtgacattgaagataatgctattgaaggtgatcctgtatgccgccttgcattcgatgtgtacgaatatcgtatcgcgaaatatattggcgcatacgctgcggccatgaacggtgttgacgcgatcgtctttaccgcaggagttggcgaaaatagccgcattatgcgcgaagaaattattgagaactacttgggctacttagggatcaagatcgataaagaagccaatgacttcaaaggtgaggagaagatcatttcaacgcccgattccaaagtgattgcgatggtaattccgaccaacgaggagctcatgatcgccaaagacacgaaagaaatcattgagaaagggttggacgagcttaagatc

SEQ ID NO: 262 - protein, 417 aa, synthetic construct
  REGION 1..417: note = Variant of acetate kinase
MHHHHHHGGSGMKVLVINSGSSSIKYQLLDMTNEKVLAKGLVERIGIDGSRIVHKVNGEKHVLEHEIKNHEIGLKLVLDLLTDEKYGVLKDLKEIDAVGHRVVHGGERFASSVKITDEVLKTIETLSFLAPLHNPANIMGIKSSMKLLPGVPQVAVFDTAFHQKMPEKAYLYAIPYEYYEKYKIRRYGFHGTSHRYVSKRAAEIMGKPYDQLKIITVHVGNGASVAAVKNGVSVDTSMGFTPLEGLVMGTRSGDIDPAIVEFLEKEEGLSAKEVVNILNKKSGVYGLTKGFSSDMRDIEDNAIEGDPVCRLAFDVYEYRIAKYIGAYAAAMNGVDAIVFTAGVGENSRIMREEIIENYLGYLGIKIDKEANDFKGEEKIISTPDSKVIAMVIPTNEELMIAKDTKEIIEKGLDELKI

SEQ ID NO: 263 - DNA, 1251 bp, synthetic construct
  misc_feature 1..1251: note = Variant of acetate kinase
  source 1..1251: mol_type = other DNA
atgcaccatcatcatcatcatggcggtagcggcatgaaagttctggtgattaattctggtagctcctccatcaaatatcagctcctcgatatgaccaacgaaaaggtattagcgaaaggcttggtcgagcgcattggcatcgacggttcgcgtattgtgcataaagttaacggcgaaaaacacgtgctggaacatgagattaaggatcacgaaattggacttaaattggtcctggatcttcttacggacgaaaaatacggtgtgttgaaggatctcaaagaaatcgatgcagttgggcatcgcgtagtacatggcggcgagcgttttgccagtagcgtgaagattactgacgaagtcttaaagaccatcgagacgttgtcgttcttagctccgttacacaatccagcgaacattatgggtatcaagagcagcatgaaattattaccgggtgtgcctcaagttgccgtctttgatacagcgttccaccagaagatgccggagaaagcctatttgtacgcaatcccctatgagtactacgagaaatataaaattcgccgctatgggtttcatggaacctcacatcgttatgtgagtaaacgtgctgcggaaattatgggcaaaccgtacgatcagctcaagatcattaccgttcacgtgggtaacggcgcatcagttgcggcggtgaagaatggcgtatctgttgacacttccatgggtttcacaccacttgaaggtcttgtcatgggcacgcgcagcggcgatattgatccggccatcgtggaatttcttgagaaagaagaaggattgtcggccaaagaagtcgtcaacatcctcaacaagaaatctggtgtgtatgggctcaccaaaggctttagtagtgacatgcgtgacattgaagataatgctattgaaggtgatcctgtatgccgccttgcattcgatgtgtacgaatatcgtatcgcgaaatatattggcgcatacgctgcggccatgaacggtgttgacgcgatcgtctttaccgcaggagttggcgaaaatagccgcattatgcgcgaagaaattattgagaactacttgggctacttagggatcaagatcgataaagaagccaatgatttcaaaggtgaggagaagatcatttcaacgcccgattccaaagtgattgcgatggtaattccgaccaacgaggagctcatgatcgccaaagacacgaaagaaatcattgagaaagggttggacgagcttaagatc

SEQ ID NO: 264 - protein, 417 aa, synthetic construct
  REGION 1..417: note = Variant of acetate kinase
MHHHHHHGGSGMKVLVINSGSSSIKYQLLDMTNEKVLAKGLVERIGIDGSRIVHKVNGEKHVLEHEIKDHEIGLKLVLDLLTDEKYGVLKDLKEIDAVGHRVVHGGERFASSVKITDEVLKTIETLSFLAPLHNPANIMGIKSSMKLLPGVPQVAVFDTAFHQKMPEKAYLYAIPYEYYEKYKIRRYGFHGTSHRYVSKRAAEIMGKPYDQLKIITVHVGNGASVAAVKNGVSVDTSMGFTPLEGLVMGTRSGDIDPAIVEFLEKEEGLSAKEVVNILNKKSGVYGLTKGFSSDMRDIEDNAIEGDPVCRLAFDVYEYRIAKYIGAYAAAMNGVDAIVFTAGVGENSRIMREEIIENYLGYLGIKIDKEANDFKGEEKIISTPDSKVIAMVIPTNEELMIAKDTKEIIEKGLDELKI

SEQ ID NO: 265 - DNA, 1251 bp, synthetic construct
  misc_feature 1..1251: note = Variant of acetate kinase
  source 1..1251: mol_type = other DNA
atgcaccatcatcatcatcatggcggtagcggcatgaaagttctggtgattaattctggtagctcctccatcaaatatcagctcctcgatatgaccaacgaaaaggtattagcgaaaggcttggtcgagcgcattggcatcgacggttcgcgtatcgtgcataaagttaacggcgaaaaacacgtgctggaacatgagattaagaatcacgaaattggacttaaattggtcctggatcttcttacggacgaaaaatacggtgtgttgaaggatctcaaagaaatcgatgcagttgggcatcgcgtagtacatggcggcgagcgttttgccagtagcgtgaagattactgacgaagtcttaaagaccatcgagacgttgtcgttcttagctccgttacacaatccagcgaacattatgggtatcaagagcagcatgaaagtgttaccgggtgtgcctcaagttgccgtctttgatacagcgttccaccagaagatgccggagaaagcctatttgtacgcaatcccctatgagtactacgagaaatataaaattcgccgctatgggtttcatggaacctcacatcgttatgtgagtaaacgtgctgcggaaattctgggcaaaccgtacgatcagctcaagatcattaccgttcacgtgggtaacggcgcatcagttgcggcggtgaagaatggcgtatctgttgacacttccatgggtttcacaccacttgaaggtcttgtcatgggcacgcgcagcggcgatattgatccggccatcgtggaatttcttgagaaagaagaaggattgtcggccaaagaagtcgtcaacatcctcaacaagaaatctggtgtgtatgggctcaccaaaggctttagtagtgacatgcgtgacattgaagataatgctattgaaggtgatcctgtatgccgccttgcattcgatgtgtacgaatatcgtatcgcgaaatatattggcgcatacgctgcggccatgaacggtgttgacgcgatcgtctttaccgcaggagttggcgaaaatagcccgattatgcgcgaagaaattattgagaactacttgggctacttagggatcaagatcgataaagaagccaatgacttcaaaggtgaggagaagatcatttcaacgcccgattccaaagtgattgcgatggtagttccgaccaacgaggagctcatgatcgccaaagacacgaaagaaatcattgagaaagggttggacgagcttaagatc

SEQ ID NO: 266 - protein, 417 aa, synthetic construct
  REGION 1..417: note = Variant of acetate kinase
MHHHHHHGGSGMKVLVINSGSSSIKYQLLDMTNEKVLAKGLVERIGIDGSRIVHKVNGEKHVLEHEIKNHEIGLKLVLDLLTDEKYGVLKDLKEIDAVGHRVVHGGERFASSVKITDEVLKTIETLSFLAPLHNPANIMGIKSSMKVLPGVPQVAVFDTAFHQKMPEKAYLYAIPYEYYEKYKIRRYGFHGTSHRYVSKRAAEILGKPYDQLKIITVHVGNGASVAAVKNGVSVDTSMGFTPLEGLVMGTRSGDIDPAIVEFLEKEEGLSAKEVVNILNKKSGVYGLTKGFSSDMRDIEDNAIEGDPVCRLAFDVYEYRIAKYIGAYAAAMNGVDAIVFTAGVGENSPIMREEIIENYLGYLGIKIDKEANDFKGEEKIISTPDSKVIAMVVPTNEELMIAKDTKEIIEKGLDELKI

SEQ ID NO: 267 - DNA, 1251 bp, synthetic construct
  misc_feature 1..1251: note = Variant of acetate kinase
  source 1..1251: mol_type = other DNA
atgcaccatcatcatcatcatggcggtagcggcatgaaagttctggtgattaattctggtagctcctccatcaaatatcagctcctcgatatgaccaacgaaaaggtattagcgaaaggcttggtcgagcgcattggcatcgacggttcgcgtattgtgcataaagttaacggcgaaaaacacgtgctggaacatgagattaaggatcacgaaattggacttaaattggtcctggatcttcttacggacgaaaaatacggtgtgttgaaggatctcaaagaaatcgatgcagttgggcatcgcgtagtacatggcggcgagcgttttgccagtagcgtgaagattactgacgaagtcttaaagaccatcgagacgttgtcgttcttagctccgttacacaatccactgaacattatgggtatcaagagcagcatgaaattattaccgggtgtgcctcaagttgccgtctttgatacagcgttccaccagaagatgccggagaaagcctatttgtacgcaatcccctatgagtactacgagaaatataaaattcgccgctatgggtttcatggaacctcacatcgttatgtgagtaaacgtgctgcggaaattatgggcaaaccgtacgatcagctcaagatcattaccgttcacgtgggtaacggcgcatcagttgcggcggtgaagaatggcgtatctgttgacacttccatgggtttcacaccacttgaaggtcttgtcatgggcacgcgcagcggcgatattgatccggccatcgtggaatttcttgagaaagaagaaggattgtcggccaaagaagtcgtcaacatcctcaacaagaaatctggtgtgtatgggctcaccaaaggctttagtagtgacatgcgtgacattgaagataatgctattgaaggtgatcctgtatgccgccttgcattcgatgtgtacgaatatcgtatcgcgaaatatattggcgcatacgctgcggccatgaacggtgttgacgcgatcgtctttaccgcaggagttggcgaaaatagcccgattatgcgcgaagaaattattgagaactacttgggctacttagggatcaagatcgataaagaagccaatcgcttcaaaggtgaggagaagatcatttcaacgcccgattccaaagtgattgcgatggtaattccgaccaacgaggagctcatgatcgccaaagacacgaaagaaatcattgagaaagggttggacgagcttaagatc

SEQ ID NO: 268 - protein, 417 aa, synthetic construct
  REGION 1..417: note = Variant of acetate kinase
MHHHHHHGGSGMKVLVINSGSSSIKYQLLDMTNEKVLAKGLVERIGIDGSRIVHKVNGEKHVLEHEIKDHEIGLKLVLDLLTDEKYGVLKDLKEIDAVGHRVVHGGERFASSVKITDEVLKTIETLSFLAPLHNPLNIMGIKSSMKLLPGVPQVAVFDTAFHQKMPEKAYLYAIPYEYYEKYKIRRYGFHGTSHRYVSKRAAEIMGKPYDQLKIITVHVGNGASVAAVKNGVSVDTSMGFTPLEGLVMGTRSGDIDPAIVEFLEKEEGLSAKEVVNILNKKSGVYGLTKGFSSDMRDIEDNAIEGDPVCRLAFDVYEYRIAKYIGAYAAAMNGVDAIVFTAGVGENSPIMREEIIENYLGYLGIKIDKEANRFKGEEKIISTPDSKVIAMVIPTNEELMIAKDTKEIIEKGLDELKI

SEQ ID NO: 269 - DNA, 1251 bp, synthetic construct
  misc_feature 1..1251: note = Variant of acetate kinase
  source 1..1251: mol_type = other DNA
atgcaccatcatcatcatcatggcggtagcggcatgaaagttctggtgattaattctggtagctcctccatcaaatatcagctcctcgatatgaccaacgaaaaggtattagcgaaaggcttggtcgagcgcattggcatcgacggttcgcgtattgtgcataaagttaacggcgaaaaacacgtgctggaacatgagattaaggatcacgaaattggacttaaattggtcctggatcttcttacggacgaaaaatacggtgtgttgaaggatctcaaagaaatcgatgcagttgggcatcgcgtagtacatggcggcgagcgttttgccagtagcgtgaagattactgacgaagtcttaaagaccatcgagacgttgtcgttcttagctccgttacacaatccactgaacattatgggtatcaagagcagcatgaaattactgccgggtgtgcctcaagttgccgtctttgatacagcgttccaccagaagatgccggagaaagcctatttgtacgcaatcccctatgagtactacgagaaatataaaattcgccgctatgggtttcatggaacctcacatcgttatgtgagtaaacgtgctgcggaaattatgggcaaaccgtacgatcagctcaagatcattaccgttcacgtgggtaacggcgcatcagttgcggcggtgaagaatggcgtatctgttgacacttccatgggtttcacaccacttgaaggtcttgtcatgggcacgcgcagcggcgatattgatccggccatcgtggaatttcttgagaaagaagaaggattgtcggccaaagaagtcgtcaacatcctcaacaagaaatctggtgtgtatgggctcaccaaaggctttagtagtgacatgcgtgacattgaagataatgctattgaaggtgatcctgtatgccgccttgcattcgatgtgtacgaatatcgtatcgcgaaatatattggcgcatacgctgcggccatgaacggtgttgacgcgatcgtctttaccgcaggagttggcgaaaatagcccgattatgcgcgaagaaattattgagaactacttgggctacttagggatcaagatcgataaagaagccaatcgcttcaaaggtgaggagaagatcatttcaacgcccgattccaaagtgattgcgatggtagttccgaccaacgaggagctcatgatcgccaaagacacgaaagaaatcattgagaaagggttggacgagcttaagatc

SEQ ID NO: 270 - protein, 417 aa, synthetic construct
  REGION 1..417: note = Variant of acetate kinase
MHHHHHHGGSGMKVLVINSGSSSIKYQLLDMTNEKVLAKGLVERIGIDGSRIVHKVNGEKHVLEHEIKDHEIGLKLVLDLLTDEKYGVLKDLKEIDAVGHRVVHGGERFASSVKITDEVLKTIETLSFLAPLHNPLNIMGIKSSMKLLPGVPQVAVFDTAFHQKMPEKAYLYAIPYEYYEKYKIRRYGFHGTSHRYVSKRAAEIMGKPYDQLKIITVHVGNGASVAAVKNGVSVDTSMGFTPLEGLVMGTRSGDIDPAIVEFLEKEEGLSAKEVVNILNKKSGVYGLTKGFSSDMRDIEDNAIEGDPVCRLAFDVYEYRIAKYIGAYAAAMNGVDAIVFTAGVGENSPIMREEIIENYLGYLGIKIDKEANRFKGEEKIISTPDSKVIAMVVPTNEELMIAKDTKEIIEKGLDELKI

SEQ ID NO: 271 - DNA, 1251 bp, synthetic construct
  misc_feature 1..1251: note = Variant of acetate kinase
  source 1..1251: mol_type = other DNA
atgcaccatcatcatcatcatggcggtagcggcatgaaagttctggtgattaattctggtagctcctccatcaaatatcagctcctcgatatgaccaacgaaaaggtattagcgaaaggcttggtcgagcgcattggcatcgacggttcgcgtatcgtgcataaagttaacggcgaaaaacacgtgctggaacatgagattaagaatcacgaaattggacttaaattggtcctggatcttcttacggacgaaaaatacggtgtgttgaaggatctcaaagaaatcgatgcagttgggcatcgcgtagtacatggcggcgagcgttttgccagtagcgtgaagattactgacgaagtcttaaagaccatcgagacgttgtcgttcttagctccgttacacaatccagcgaacattatgggtatcaagagcagcatgaaagtgttaccgggtgtgcctcaagttgccgtctttgatacagcgttccaccagaagatgccggagaaagcctatttgtacgcaatcccctatgagtactacgagaaatataaaattcgccgctatgggtttcatggaacctcacatcgttatgtgagtaaacgtgctgcggaaattctgggcaaaccgtacgatcagctcaagatcattaccgttcacgtgggtaacggcgcatcagttgcggcggtgaagaatggcgtatctgttgacacttccatgggtttcacaccacttgaaggtcttgtcatgggcacgcgcagcggcgatattgatccggccatcgtggaatttcttgagaaagaagaaggattgtcggccaaagaagtcgtcaacatcctcaacaagaaatctggtgtgtatgggctcaccaaaggctttagtagtgacatgcgtgacattgaagataatgctattgaaggtgatcctgtatgccgccttgcattcgatgtgtacgaatatcgtatcgcgaaatatattggcgcatacgctgcggccatgaacggtgttgacgcgatcgtctttaccgcaggagttggcgaaaatagcccgattatgcgccatgaaattattgagaactacttgggctacttagggatcaagatcgataaagaagccaatgacttcaaaggtgaggagaagatcatttcaacgcccgattccaaagtgattgcgatggtagttccgaccaacgaggagctcatgatcgccaaagacacgaaagaaatcattgagaaagggttggacgagcttaagatc

SEQ ID NO: 272 - protein, 417 aa, synthetic construct
  REGION 1..417: note = Variant of acetate kinase
MHHHHHHGGSGMKVLVINSGSSSIKYQLLDMTNEKVLAKGLVERIGIDGSRIVHKVNGEKHVLEHEIKNHEIGLKLVLDLLTDEKYGVLKDLKEIDAVGHRVVHGGERFASSVKITDEVLKTIETLSFLAPLHNPANIMGIKSSMKVLPGVPQVAVFDTAFHQKMPEKAYLYAIPYEYYEKYKIRRYGFHGTSHRYVSKRAAEILGKPYDQLKIITVHVGNGASVAAVKNGVSVDTSMGFTPLEGLVMGTRSGDIDPAIVEFLEKEEGLSAKEVVNILNKKSGVYGLTKGFSSDMRDIEDNAIEGDPVCRLAFDVYEYRIAKYIGAYAAAMNGVDAIVFTAGVGENSPIMRHEIIENYLGYLGIKIDKEANDFKGEEKIISTPDSKVIAMVVPTNEELMIAKDTKEIIEKGLDELKI

SEQ ID NO: 273 - DNA, 1251 bp, synthetic construct
  misc_feature 1..1251: note = Variant of acetate kinase
  source 1..1251: mol_type = other DNA
atgcaccatcatcatcatcatggcggtagcggcatgaaagttctggtgattaattctggtagctcctccatcaaatatcagctcctcgatatgaccaacgaaaaggtattagcgaaaggcttggtcgagcgcattggcatcgacggttcgcgtattgtgcataaagttaacggcgaaaaacacgtgctggaacatgagattaagaatcacgaaattggacttaaattggtcctggatcttcttacggacgaaaaatacggtgtgttgaaggatctcaaagaaatcgatgcagttgggcatcgcgtagtacatggcggcgagcgttttgccagtagcgtgaagattactgacgaagtcttaaagaccatcgagacgttgtcgttcttagctccgttacacaatccagcgaacattatgggtatcaagagcagcatgaaattaatgccgggtgtgcctcaagttgccgtctttgatacagcgttccaccagaagatgccggagaaagcctatttgtacgcaatcccctatgagtactacgagaaatataaaattcgccgctatgggtttcatggaacctcacatcgttatgtgagtaaacgtgctgcggaaattatgggcaaaccgtacgatcagctcaagatcattaccgttcacgtgggtaacggcgcatcagttgcggcggtgaagaatggcgtatctgttgacacttccatgggtttcacaccacttgaaggtcttgtcatgggcacgcgcagcggcgatattgatccggccatcgtggaatttcttgagaaagaagaaggattgtcggccaaagaagtcgtcaacatcctcaacaagaaatctggtgtgtatgggctcaccaaaggctttagtagtgacatgcgtgacattgaagataatgctattgaaggtgatcctgtatgccgccttgcattcgatgtgtacgaatatcgtatcgcgaaatatattggcgcatacgctgcggccatgaacggtgttgacgcgatcgtctttaccgcaggagttggcgaaaatagcccgattatgcgcgaagaaattattgagaactacttgggctacttagggatcaagatcgataaagaagccaatcgcttcaaaggtgaggagaagatcatttcaacgcccgattccaaagtgattgcgatggtagttccgaccaacgaggagctcatgatcgccaaagacacgaaagaaatcattgagaaagggttggacgagcttaagatc

SEQ ID NO: 274 - protein, 417 aa, synthetic construct
  REGION 1..417: note = Variant of acetate kinase
MHHHHHHGGSGMKVLVINSGSSSIKYQLLDMTNEKVLAKGLVERIGIDGSRIVHKVNGEKHVLEHEIKNHEIGLKLVLDLLTDEKYGVLKDLKEIDAVGHRVVHGGERFASSVKITDEVLKTIETLSFLAPLHNPANIMGIKSSMKLMPGVPQVAVFDTAFHQKMPEKAYLYAIPYEYYEKYKIRRYGFHGTSHRYVSKRAAEIMGKPYDQLKIITVHVGNGASVAAVKNGVSVDTSMGFTPLEGLVMGTRSGDIDPAIVEFLEKEEGLSAKEVVNILNKKSGVYGLTKGFSSDMRDIEDNAIEGDPVCRLAFDVYEYRIAKYIGAYAAAMNGVDAIVFTAGVGENSPIMREEIIENYLGYLGIKIDKEANRFKGEEKIISTPDSKVIAMVVPTNEELMIAKDTKEIIEKGLDELKI

SEQ ID NO: 275 - DNA, 1251 bp, synthetic construct
  misc_feature 1..1251: note = Variant of acetate kinase
  source 1..1251: mol_type = other DNA
atgcaccatcatcatcatcatggcggtagcggcatgaaagttctggtgattaattctggtagctcctccatcaaatatcagctcctcgatatgaccaacgaaaaggtattagcgaaaggcttggtcgagcgcattggcatcgacggttcgcgtcttgtgcataaagttaacggcgaaaaacacgtgctggaacatgagattaaggatcacgaaattggacttaaattggtcctggatcttcttacggacgaaaaatacggtgtgttgaaggatctcaaagaaatcgatgcagttgggcatcgcgtagtacatggcggcgagcgttttgccagtagcgtgaagattactgacgaagtcttaaagaccatcgagacgttgtcgttcttagctccgttacacaatccagcgaacattatgggtatcaagagcagcatgaaattattaccgggtgtgcctcaagttgccgtctttgatacagcgttccaccagaagatgccggagaaagcctatttgtacgcaatcccctatgagtactacgagaaatataaaattcgccgctatgggtttcatggaacctcacatcgttatgtgagtaaacgtgctgcggaaattatgggcaaaccgtacgatcagctcaagatcattaccgttcacgtgggtaacggcgcatcagttgcggcggtgaagaatggcgtatctgttgacacttccatgggtttcacaccacttgaaggtcttgtcatgggcacgcgcagcggcgatattgatccggccatcgtggaatttcttgagaaagaagaaggattgtcggccaaagaagtcgtcaacatcctcaacaagaaatctggtgtgtatgggctcaccaaaggctttagtagtgacatgcgtgacattgaagataatgctattgaaggtgatcctgtatgccgccttgcattcgatgtgtacgaatatcgtatcgcgaaatatattggcgcatacgctgcggccatgaacggtgttgacgcgatcgtctttaccgcaggagttggcgaaaatagccgcattatgcgcgaagaaattattgagaactacttgggctacttagggatcaagatcgataaagaagccaatcgcttcaaaggtgaggagaagatcatttcaacgcccgattccaaagtgattgcgatggtagttccgaccaacgaggagctcatgatcgccaaagacacgaaagaaatcattgagaaagggttggacgagcttaagatc

SEQ ID NO: 276 - protein, 417 aa, synthetic construct
  REGION 1..417: note = Variant of acetate kinase
MHHHHHHGGSGMKVLVINSGSSSIKYQLLDMTNEKVLAKGLVERIGIDGSRLVHKVNGEKHVLEHEIKDHEIGLKLVLDLLTDEKYGVLKDLKEIDAVGHRVVHGGERFASSVKITDEVLKTIETLSFLAPLHNPANIMGIKSSMKLLPGVPQVAVFDTAFHQKMPEKAYLYAIPYEYYEKYKIRRYGFHGTSHRYVSKRAAEIMGKPYDQLKIITVHVGNGASVAAVKNGVSVDTSMGFTPLEGLVMGTRSGDIDPAIVEFLEKEEGLSAKEVVNILNKKSGVYGLTKGFSSDMRDIEDNAIEGDPVCRLAFDVYEYRIAKYIGAYAAAMNGVDAIVFTAGVGENSRIMREEIIENYLGYLGIKIDKEANRFKGEEKIISTPDSKVIAMVVPTNEELMIAKDTKEIIEKGLDELKI

SEQ ID NO: 277 - DNA, 1251 bp, synthetic construct
  misc_feature 1..1251: note = Variant of acetate kinase
  source 1..1251: mol_type = other DNA
atgcaccatcatcatcatcatggcggtagcggcatgaaagttctggtgattaattctggtagctcctccatcaaatatcagctcctcgatatgaccaacgaaaaggtattagcgaaaggcttggtcgagcgcattggcatcgacggttcgcgtcttgtgcataaagttaacggcgaaaaacacgtgctggaacatgagattaaggatcacgaaattggacttaaattggtcctggatcttcttacggacgaaaaatacggtgtgttgaaggatctcaaagaaatcgatgcagttgggcatcgcgtagtacatggcggcgagcgttttgccagtagcgtgaagattactgacgaagtcttaaagaccatcgagacgttgtcgttcttagctccgttacacaatccagcgaacattatgggtatcaagagcagcatgaaattattaccgggtgtgcctcaagttgccgtctttgatacagcgttccaccagaagatgccggagaaagcctatttgtacgcaatcccctatgagtactacgagaaatataaaattcgccgctatgggtttcatggaacctcacatcgttatgtgagtaaacgtgctgcggaaattatgggcaaaccgtacgatcagctcaagatcattaccgttcacgtgggtaacggcgcatcagttgcggcggtgaagaatggcgtatctgttgacacttccatgggtttcacaccacttgaaggtcttgtcatgggcacgcgcagcggcgatattgatccggccatcgtggaatttcttgagaaagaagaaggattgtcggccaaagaagtcgtcaacatcctcaacaagaaatctggtgtgtatgggctcaccaaaggctttagtagtgacatgcgtgacattgaagataatgctattgaaggtgatcctgtatgccgccttgcattcgatgtgtacgaatatcgtatcgcgaaatatattggcgcatacgctgcggccatgaacggtgttgacgcgatcgtctttaccgcaggagttggcgaaaatagccgcattatgcgcgaagaaattattgagaactacttgggctacttagggatcaagatcgataaagaagccaatgatttcaaaggtgaggagaagatcatttcaacgcccgattccaaagtgattgcgatggtagttccgaccaacgaggagctcatgatcgccaaagacacgaaagaaatcattgagaaagggttggacgagcttaagatc

SEQ ID NO: 278 - protein, 417 aa, synthetic construct
  REGION 1..417: note = Variant of acetate kinase
MHHHHHHGGSGMKVLVINSGSSSIKYQLLDMTNEKVLAKGLVERIGIDGSRLVHKVNGEKHVLEHEIKDHEIGLKLVLDLLTDEKYGVLKDLKEIDAVGHRVVHGGERFASSVKITDEVLKTIETLSFLAPLHNPANIMGIKSSMKLLPGVPQVAVFDTAFHQKMPEKAYLYAIPYEYYEKYKIRRYGFHGTSHRYVSKRAAEIMGKPYDQLKIITVHVGNGASVAAVKNGVSVDTSMGFTPLEGLVMGTRSGDIDPAIVEFLEKEEGLSAKEVVNILNKKSGVYGLTKGFSSDMRDIEDNAIEGDPVCRLAFDVYEYRIAKYIGAYAAAMNGVDAIVFTAGVGENSRIMREEIIENYLGYLGIKIDKEANDFKGEEKIISTPDSKVIAMVVPTNEELMIAKDTKEIIEKGLDELKI

SEQ ID NO: 279 - DNA, 1251 bp, synthetic construct
  misc_feature 1..1251: note = Variant of acetate kinase
  source 1..1251: mol_type = other DNA
atgcaccatcatcatcatcatggcggtagcggcatgaaagttctggtgattaattctggtagctcctccatcaaatatcagctcctcgatatgaccaacgaaaaggtattagcgaaaggcttggtcgagcgcattggcatcgacggttcgcgtatcgtgcataaagttaacggcgaaaaacacgtgctggaacatgagattaagaatcacgaaattggacttaaattggtcctggatcttcttacggacgaaaaatacggtgtgttgaaggatctcaaagaaatcgatgcagttgggcatcgcgtagtacatggcggcgagcgttttgccagtagcgtgaagattactgacgaagtcttaaagaccatcgagacgttgtcgttcttagctccgttacacaatccagtgaacattatgggtatcaagagcagcatgaaattattaccgggtgtgcctcaagttgccgtctttgatacagcgttccaccagaagatgccggagaaagcctatttgtacgcaatcccctatgagtactacgagaaatataaaattcgccgctatgggtttcatggaacctcacatcgttatgtgagtaaacgtgctgcggaaattatgggcaaaccgtacgatcagctcaagatcattaccgttcacgtgggtaacggcgcatcagttgcggcggtgaagaatggcgtatctgttgacacttccatgggtttcacaccacttgaaggtcttgtcatgggcacgcgcagcggcgatattgatccggccatcgtggaatttcttgagaaagaagaaggattgtcggccaaagaagtcgtcaacatcctcaacaagaaatctggtgtgtatgggctcaccaaaggctttagtagtgacatgcgtgacattgaagataatgctattgaaggtgatcctgtatgccgccttgcatttgatgtgtacgaatatcgtatcgcgaaatatattggcgcatacgctgcggccatgaacggtgttgacgcgatcgtctttaccgcaggagttggcgaaaatagcccgattatgcgcgaagaaattattgagaactacttgggctacttagggatcaagatcgataaagaagccaatgacgttaaaggtgaggagaagatcatttcaacgcccgattccaaagtgattgcgatggtagttccgaccaacgaggagctcatgatcgccaaagacacgaaagaaatcattgagaaagggttggacgagcttaagatc

SEQ ID NO: 280 - protein, 417 aa, synthetic construct
  REGION 1..417: note = Variant of acetate kinase
MHHHHHHGGSGMKVLVINSGSSSIKYQLLDMTNEKVLAKGLVERIGIDGSRIVHKVNGEKHVLEHEIKNHEIGLKLVLDLLTDEKYGVLKDLKEIDAVGHRVVHGGERFASSVKITDEVLKTIETLSFLAPLHNPVNIMGIKSSMKLLPGVPQVAVFDTAFHQKMPEKAYLYAIPYEYYEKYKIRRYGFHGTSHRYVSKRAAEIMGKPYDQLKIITVHVGNGASVAAVKNGVSVDTSMGFTPLEGLVMGTRSGDIDPAIVEFLEKEEGLSAKEVVNILNKKSGVYGLTKGFSSDMRDIEDNAIEGDPVCRLAFDVYEYRIAKYIGAYAAAMNGVDAIVFTAGVGENSPIMREEIIENYLGYLGIKIDKEANDVKGEEKIISTPDSKVIAMVVPTNEELMIAKDTKEIIEKGLDELKI

SEQ ID NO: 281 - DNA, 1251 bp, synthetic construct
  misc_feature 1..1251: note = Variant of acetate kinase
  source 1..1251: mol_type = other DNA
atgcaccatcatcatcatcatggcggtagcggcatgaaagttctggtgattaattctggtagctcctccatcaaatatcagctcctcgatatgaccaacgaaaaggtattagcgaaaggcttggtcgagcgcattggcatcgacggttcgcgtatcgtgcataaagttaacggcgaaaaacacgtgctggaacatgagattccgaatcacgaaattggacttaaattggtcctggatcttcttacggacgaaaaatacggtgtgttgaaggatctcaaagaaatcgatgcagttgggcatcgcgtagtacatggcggcgagcgttttgccagtagcgtgaagattactgacgaagtcttaaagaccatcgagacgttgtcgttcttagctccgttacacaatccagtgaacattatgggtatcaagagcagcatgaaattattaccgggtgtgcctcaagttgccgtctttgatacagcgttccaccagaagatgccggagaaagcctatttgtacgcaatcccctatgagtactacgagaaatataaaattcgccgctatgggtttcatggaacctcacatcgttatgtgagtaaacgtgctgcggaaattatgggcaaaccgtacgatcagctcaagatcattaccgttcacgtgggtaacggcgcatcagttgcggcggtgaagaatggcgtatctgttgacacttccatgggtttcacaccacttgaaggtcttgtcatgggcacgcgcagcggcgatattgatccggccatcgtggaatttcttgagaaagaagaaggattgtcggccaaagaagtcgtcaacatcctcaacaagaaatctggtgtgtatgggctcaccaaaggctttagtagtgacatgcgtgacattgaagataatgctattgaaggtgatcctgtatgccgccttgcattagatgtgtacgaatatcgtatcgcgaaatatattggcgcatacgctgcggccatgaacggtgttgacgcgatcgtctttaccgcaggagttggcgaaaatagcccgattatgcgcgaagaaattattgagaactacttgggctacttagggatcaagatcgataaagaagccaatgactttaaaggtgaggagaagatcatttcaacgcccgattccaaagtgattgcgatggtagttccgaccaacgaggagctcatgatcgccaaagacacgaaagaaatcgttgagaaagggttggacgagcttaagatc

SEQ ID NO: 282 - protein, 417 aa, synthetic construct
  REGION 1..417: note = Variant of acetate kinase
MHHHHHHGGSGMKVLVINSGSSSIKYQLLDMTNEKVLAKGLVERIGIDGSRIVHKVNGEKHVLEHEIPNHEIGLKLVLDLLTDEKYGVLKDLKEIDAVGHRVVHGGERFASSVKITDEVLKTIETLSFLAPLHNPVNIMGIKSSMKLLPGVPQVAVFDTAFHQKMPEKAYLYAIPYEYYEKYKIRRYGFHGTSHRYVSKRAAEIMGKPYDQLKIITVHVGNGASVAAVKNGVSVDTSMGFTPLEGLVMGTRSGDIDPAIVEFLEKEEGLSAKEVVNILNKKSGVYGLTKGFSSDMRDIEDNAIEGDPVCRLALDVYEYRIAKYIGAYAAAMNGVDAIVFTAGVGENSPIMREEIIENYLGYLGIKIDKEANDFKGEEKIISTPDSKVIAMVVPTNEELMIAKDTKEIVEKGLDELKI

SEQ ID NO: 283 - DNA, 1251 bp, synthetic construct
  misc_feature 1..1251: note = Variant of acetate kinase
  source 1..1251: mol_type = other DNA
atgcaccatcatcatcatcatggcggtagcggcatgaaagttctggtgattaattctggtagctcctccatcaaatatcagctcctcgatatgaccaacgaaaaggtattagcgaaaggcttggtcgagcgcattggcatcgacggttcgcgtatcgtgcataaagttaacggcgaaaaacacgtgctggaacatgagattaagaatcacgaaattggacttaaattggtcctggatcttcttacggacgaaaaatacggtgtgttgaaggatctcaaagaaatcgatgcagttgggcatcgcgtagtacatggcggcgagcgttttgccagtagcgtgaagattactgacgaagtcttaaagaccatcgagacgttgtcgttcttagctccgttacacaatccagtgaacattatgggtatcaagagcagcatgaaattattaccgggtgtgcctcaagttgccgtctttgatacagcgttccaccagaagatgccggagaaagcctatttgtacgcaatcccctatgagtactacgagaaatataaaattcgccgctatgggtttcatggaacctcacatcgttatgtgagtaaacgtgctgcggaaattctgggcaaaccgtacgatcagctcaagatcattaccgttcacgtgggtaacggcgcatcagttgcggcggtgaagaatggcgtatctgttgacacttccatgggtttcacaccacttgaaggtcttgtcatgggcacgcgcagcggcgatattgatccggccatcgtggaatttcttgagaaagaagaaggattgtcggccaaagaagtcgtcaacatcctcaacaagaaatctggtgtgtatgggctcaccaaaggctttagtagtgacatgcgtgacattgaagataatgctattgaaggtgatcctgtatgccgccttgcattagatgtgtacgaatatcgtatcgcgaaatatattggcgcatacgctgcggccatgaacggtgttgacgcgatcgtctttaccgcaggagttggcgaaaatagcccgattatgcgccatgaaattattgagaactacttgggctacttagggatcaagatcgataaagaagccaatgactttaaaggtgaggagaagatcatttcaacgcccgattccaaagtgattgcgatggtagttccgaccaacgaggagctcatgatcgccaaagacacgaaagaaatcgttgagaaagggttggacgagcttaagatc

SEQ ID NO: 284 - protein, 417 aa, synthetic construct
  REGION 1..417: note = Variant of acetate kinase
MHHHHHHGGSGMKVLVINSGSSSIKYQLLDMTNEKVLAKGLVERIGIDGSRIVHKVNGEKHVLEHEIKNHEIGLKLVLDLLTDEKYGVLKDLKEIDAVGHRVVHGGERFASSVKITDEVLKTIETLSFLAPLHNPVNIMGIKSSMKLLPGVPQVAVFDTAFHQKMPEKAYLYAIPYEYYEKYKIRRYGFHGTSHRYVSKRAAEILGKPYDQLKIITVHVGNGASVAAVKNGVSVDTSMGFTPLEGLVMGTRSGDIDPAIVEFLEKEEGLSAKEVVNILNKKSGVYGLTKGFSSDMRDIEDNAIEGDPVCRLALDVYEYRIAKYIGAYAAAMNGVDAIVFTAGVGENSPIMRHEIIENYLGYLGIKIDKEANDFKGEEKIISTPDSKVIAMVVPTNEELMIAKDTKEIVEKGLDELKI

SEQ ID NO: 285 - DNA, 1251 bp, synthetic construct
  misc_feature 1..1251: note = Variant of acetate kinase
  source 1..1251: mol_type = other DNA
atgcaccatcatcatcatcatggcggtagcggcatgaaagttctggtgattaattctggtagctcctccatcaaatatcagctcctcgatatgaccaacgaaaaggtattagcgaaaggcttggtcgagcgcattggcatcgacggttcgcgtatcgtgcataaagttaacggcgaaaaacacgtgctggaacatgagattaaaaatcacgaaattggacttaaattggtcctggatcttcttacggacgaaaaatacggtgtgttgaaggatctcaaagaaatcgatgcagttgggcatcgcgtagtacatggcggcgagcgttttgccagtagcgtgaagattactgacgaagtcttaaagaccatcgagacgttgtcgttcttagctccgttacacaatccagcgaacattatgggtatcaagagcagcatgaaagtgttaccgggtgtgcctcaagttgccgtctttgatacagcgttccaccagaagatgccggagaaagcctatttgtacgcaatcccctatgagtactacgagaaatataaaattcgccgctatgggtttcatggaacctcacatcgttatgtgagtaaacgtgctgcggaaattatgggcaaaccgtacgatcagctcaagatcattaccgttcacgtgggtaacggcgcatcagttgcggcggtgaagaatggcgtatctgttgacacttccatgggtttcacaccacttgaaggtcttgtcatgggcacgcgcagcggcgatattgatccggccatcgtggaatttcttgagaaagaagaaggattgtcggccaaagaagtcgtcaacatcctcaacaagaaatctggtgtgtatgggctcaccaaaggctttagtagtgacatgcgtgacattgaagataatgctattgaaggtgatcctgtatgccgccttgcatttgatgtgtacgaatatcgtatcgcgaaatatattggcgcatacgctgcggccatgaacggtgttgacgcgatcgtctttaccgcaggagttggcgaaaatagcccgattatgcgccatgaaattattgagaactacttgggctacttagggatcaagatcgataaagaagccaatgacttcaaaggtgaggagaagatcatttcaacgcccgattccaaagtgattgcgatggtagttccgaccaacgaggagctcatgatcgccaaagacacgaaagaaatcgttgagaaagggttggacgagcttaagatc

SEQ ID NO: 286 - protein, 417 aa, synthetic construct
  REGION 1..417: note = Variant of acetate kinase
MHHHHHHGGSGMKVLVINSGSSSIKYQLLDMTNEKVLAKGLVERIGIDGSRIVHKVNGEKHVLEHEIKNHEIGLKLVLDLLTDEKYGVLKDLKEIDAVGHRVVHGGERFASSVKITDEVLKTIETLSFLAPLHNPANIMGIKSSMKVLPGVPQVAVFDTAFHQKMPEKAYLYAIPYEYYEKYKIRRYGFHGTSHRYVSKRAAEIMGKPYDQLKIITVHVGNGASVAAVKNGVSVDTSMGFTPLEGLVMGTRSGDIDPAIVEFLEKEEGLSAKEVVNILNKKSGVYGLTKGFSSDMRDIEDNAIEGDPVCRLAFDVYEYRIAKYIGAYAAAMNGVDAIVFTAGVGENSPIMRHEIIENYLGYLGIKIDKEANDFKGEEKIISTPDSKVIAMVVPTNEELMIAKDTKEIVEKGLDELKI

SEQ ID NO: 287 - DNA, 1251 bp, synthetic construct
  misc_feature 1..1251: note = Variant of acetate kinase
  source 1..1251: mol_type = other DNA
atgcaccatcatcatcatcatggcggtagcggcatgaaagttctggtgattaattctggtagctcctccatcaaatatcagctcctcgatatgaccaacgaaaaggtattagcgaaaggcttggtcgagcgcattggcatcgacggttcgcgtcttgtgcataaagttaacggcgaaaaacacgtgctggaacatgagattaagaatcacgaaattggacttaaattggtcctggatcttcttacggacgaaaaatacggtgtgttgaaggatctcaaagaaatcgatgcagttgggcatcgcgtagtacatggcggcgagcgttttgccagtagcgtgaagattactgacgaagtcttaaagaccatcgagacgttgtcgttcttagctccgttacacaatccagcgaacattatgggtatcaagagcagcatgaaattaatgccgggtgtgcctcaagttgccgtctttgatacagcgttccaccagaagatgccggagaaagcctatttgtacgcaatcccctatgagtactacgagaaatataaaattcgccgctatgggtttcatggaacctcacatcgttatgtgagtaaacgtgctgcggaaattatgggcaaaccgtacgatcagctcaagatcattaccgttcacgtgggtaacggcgcatcagttgcggcggtgaagaatggcgtatctgttgacacttccatgggtttcacaccacttgaaggtcttgtcatgggcacgcgcagcggcgatattgatccggccatcgtggaatttcttgagaaagaagaaggattgtcggccaaagaagtcgtcaacatcctcaacaagaaatctggtgtgtatgggctcaccaaaggctttagtagtgacatgcgtgacattgaagataatgctattgaaggtgatcctgtatgccgccttgcattcgatgtgtacgaatatcgtatcgcgaaatatattggcgcatacgctgcggccatgaacggtgttgacgcgatcgtctttaccgcaggagttggcgaaaatagcccgattatgcgcgaagaaattattgagaactacttgggctacttagggatcaagatcgataaagaagccaatcgcttcaaaggtgaggagaagatcatttcaacgcccgattccaaagtgattgcgatggtagttccgaccaacgaggagctcatgatcgccaaagacacgaaagaaatcattgagaaagggttggacgagcttaagatc

SEQ ID NO: 288 - protein, 417 aa, synthetic construct
  REGION 1..417: note = Variant of acetate kinase
MHHHHHHGGSGMKVLVINSGSSSIKYQLLDMTNEKVLAKGLVERIGIDGSRLVHKVNGEKHVLEHEIKNHEIGLKLVLDLLTDEKYGVLKDLKEIDAVGHRVVHGGERFASSVKITDEVLKTIETLSFLAPLHNPANIMGIKSSMKLMPGVPQVAVFDTAFHQKMPEKAYLYAIPYEYYEKYKIRRYGFHGTSHRYVSKRAAEIMGKPYDQLKIITVHVGNGASVAAVKNGVSVDTSMGFTPLEGLVMGTRSGDIDPAIVEFLEKEEGLSAKEVVNILNKKSGVYGLTKGFSSDMRDIEDNAIEGDPVCRLAFDVYEYRIAKYIGAYAAAMNGVDAIVFTAGVGENSPIMREEIIENYLGYLGIKIDKEANRFKGEEKIISTPDSKVIAMVVPTNEELMIAKDTKEIIEKGLDELKI

SEQ ID NO: 289 - DNA, 1251 bp, synthetic construct
  misc_feature 1..1251: note = Variant of acetate kinase
  source 1..1251: mol_type = other DNA
atgcaccatcatcatcatcatggcggtagcggcatgaaagttctggtgattaattctggtagctcctccatcaaatatcagctcctcgatatgaccaacgaaaaggtattagcgaaaggcttggtcgagcgcattggcatcgacggttcgcgtatcgtgcataaagttaacggcgaaaaacacgtgctggaacatgagattaaaaatcacgaaattggacttaaattggtcctggatcttcttacggacgaaaaatacggtgtgttgaaggatctcaaagaaatcgatgcagttgggcatcgcgtagtacatggcggcgagcgttttgccagtagcgtgaagattactgacgaagtcttaaagaccatcgagacgttgtcgttcttagctccgttacacaatccagcgaacattatgggtatcaagagcagcatgaaactgttaccgggtgtgcctcaagttgccgtctttgatacagcgttccaccagaagatgccggagaaagcctatttgtacgcaatcccctatgagtactacgagaaatataaaattcgccgctatgggtttcatggaacctcacatcgttatgtgagtaaacgtgctgcggaaattctgggcaaaccgtacgatcagctcaagatcattaccgttcacgtgggtaacggcgcatcagttgcggcggtgaagaatggcgtatctgttgacacttccatgggtttcacaccacttgaaggtcttgtcatgggcacgcgcagcggcgatattgatccggccatcgtggaatttcttgagaaagaagaaggattgtcggccaaagaagtcgtcaacatcctcaacaagaaatctggtgtgtatgggctcaccaaaggctttagtagtgacatgcgtgacattgaagataatgctattgaaggtgatcctgtatgccgccttgcattagatgtgtacgaatatcgtatcgcgaaatatattggcgcatacgctgcggccatgaacggtgttgacgcgatcgtctttaccgcaggagttggcgaaaatagcccgattatgcgccatgaaattattgagaactacttgggctacttagggatcaagatcgataaagaagccaatgacttcaaaggtgaggagaagatcatttcaacgcccgattccaaagtgattgcgatggtagttccgaccaacgaggagctcatgatcgccaaagacacgaaagaaatcattgagaaagggttggacgagcttaagatc

SEQ ID NO: 290 - protein, 417 aa, synthetic construct
  REGION 1..417: note = Variant of acetate kinase
MHHHHHHGGSGMKVLVINSGSSSIKYQLLDMTNEKVLAKGLVERIGIDGSRIVHKVNGEKHVLEHEIKNHEIGLKLVLDLLTDEKYGVLKDLKEIDAVGHRVVHGGERFASSVKITDEVLKTIETLSFLAPLHNPANIMGIKSSMKLLPGVPQVAVFDTAFHQKMPEKAYLYAIPYEYYEKYKIRRYGFHGTSHRYVSKRAAEILGKPYDQLKIITVHVGNGASVAAVKNGVSVDTSMGFTPLEGLVMGTRSGDIDPAIVEFLEKEEGLSAKEVVNILNKKSGVYGLTKGFSSDMRDIEDNAIEGDPVCRLALDVYEYRIAKYIGAYAAAMNGVDAIVFTAGVGENSPIMRHEIIENYLGYLGIKIDKEANDFKGEEKIISTPDSKVIAMVVPTNEELMIAKDTKEIIEKGLDELKI

SEQ ID NO: 291 - DNA, 1251 bp, synthetic construct
  misc_feature 1..1251: note = Variant of acetate kinase
  source 1..1251: mol_type = other DNA
atgcaccatcatcatcatcatggcggtagcggcatgaaagttctggtgattaattctggtagctcctccatcaaatatcagctcctcgatatgaccaacgaaaaggtattagcgaaaggcttggtcgagcgcattggcatcgacggttcgcgtatcgtgcataaagttaacggcgaaaaacacgtgctggaacatgagattaagaatcacgaaattggacttaaattggtcctggatcttcttacggacgaaaaatacggtgtgttgaaggatctcaaagaaatcgatgcagttgggcatcgcgtagtacatggcggcgagcgttttgccagtagcgtgaagattactgacgaagtcttaaagaccatcgagacgttgtcgttcttagctccgttacacaatccagcgaacattatgggtatcaagagcagcatgaaattattaccgggtgtgcctcaagttgccgtctttgatacagcgttccaccagaagatgccggagaaagcctatttgtacgcaatcccctatgagtactacgagaaatataaaattcgccgctatgggtttcatggaacctcacatcgttatgtgagtaaacgtgctgcggaaattatgggcaaaccgtacgatcagctcaagatcattaccgttcacgtgggtaacggcgcatcagttgcggcggtgaagaatggcgtatctgttgacacttccatgggtttcacaccacttgaaggtcttgtcatgggcacgcgcagcggcgatattgatccggccatcgtggaatttcttgagaaagaagaaggattgtcggccaaagaagtcgtcaacatcctcaacaagaaatctggtgtgtatgggctcaccaaaggctttagtagtgacatgcgtgacattgaagataatgctattgaaggtgatcctgtatgccgccttgcattagatgtgtacgaatatcgtatcgcgaaatatattggcgcatacgctgcggccatgaacggtgttgacgcgatcgtctttaccgcaggagttggcgaaaatagcccgattatgcgccatgaaattattgagaactacttgggctacttagggatcaagatcgataaagaagccaatgacttcaaaggtgaggagaagatcatttcaacgcccgattccaaagtgattgcgatggtagttccgaccaacgaggagctcatgatcgccaaagacacgaaagaaatcgttgagaaagggttggacgagcttaagatc

SEQ ID NO: 292 - protein, 417 aa, synthetic construct
  REGION 1..417: note = Variant of acetate kinase
MHHHHHHGGSGMKVLVINSGSSSIKYQLLDMTNEKVLAKGLVERIGIDGSRIVHKVNGEKHVLEHEIKNHEIGLKLVLDLLTDEKYGVLKDLKEIDAVGHRVVHGGERFASSVKITDEVLKTIETLSFLAPLHNPANIMGIKSSMKLLPGVPQVAVFDTAFHQKMPEKAYLYAIPYEYYEKYKIRRYGFHGTSHRYVSKRAAEIMGKPYDQLKIITVHVGNGASVAAVKNGVSVDTSMGFTPLEGLVMGTRSGDIDPAIVEFLEKEEGLSAKEVVNILNKKSGVYGLTKGFSSDMRDIEDNAIEGDPVCRLALDVYEYRIAKYIGAYAAAMNGVDAIVFTAGVGENSPIMRHEIIENYLGYLGIKIDKEANDFKGEEKIISTPDSKVIAMVVPTNEELMIAKDTKEIVEKGLDELKI

SEQ ID NO: 293 - DNA, 1251 bp, synthetic construct
  misc_feature 1..1251: note = Variant of acetate kinase
  source 1..1251: mol_type = other DNA
atgcaccatcatcatcatcatggcggtagcggcatgaaagttctggtgattaattctggtagctcctccatcaaatatcagctcctcgatatgaccaacgaaaaggtattagcgaaaggcttggtcgagcgcattggcatcgacggttcgcgtatcgtgcataaagttaacggcgaaaaacacgtgctggaacatgagattaagaatcacgaaattggacttaaattggtcctggatcttcttacggacgaaaaatacggtgtgttgaaggatctcaaagaaatcgatgcagttgggcatcgcgtagtacatggcggcgagcgttttgccagtagcgtgaagattactgacgaagtcttaaagaccatcgagacgttgtcgttcttagctccgttacacaatccagcgaacattatgggtatcaagaacagcatgaaattattaccgggtgtgcctcaagttgccgtctttgatacagcgttccaccagaagatgccggagaaagcctatttgtacgcaatcccctatgagtactacgagaaatataaaattcgccgctatgggtttcatggaacctcacatcgttatgtgagtaaacgtgctgcggaaattatgggcaaaccgtacgatcagctcaagatcattaccgttcacgtgggtaacggcgcatcagttgcggcggtgaagaatggcgtatctgttgacacttccatgggtttcacaccacttgaaggtcttgtcatgggcacgcgcagcggcgatattgatccggccatcgtggaatttcttgagaaagaagaaggattgtcggccaaagaagtcgtcaacatcctcaacaagaaatctggtgtgtatgggctcaccaaaggctttagtagtgacatgcgtgacattgaagataatgctattgaaggtgatcctgtatgccgccttgcattagatgtgtacgaatatcgtatcgcgaaatatattggcgcatacgctgcggccatgaacggtgttgacgcgatcgtctttaccgcaggagttggcgaaaatagcccgattatgcgcgaagaaattattgagaactacttgggctacttagggatcaagatcgataaagaagccaatgacttcaaaggtgaggagaagatcatttcaacgcccgattccaaagtgattgcgatggtagttccgaccaacgaggagctcatgatcgccaaagacacgaaagaaatcgttgagaaagggttggacgagcttaagatc

SEQ ID NO: 294 - protein, 417 aa, synthetic construct
  REGION 1..417: note = Variant of acetate kinase
MHHHHHHGGSGMKVLVINSGSSSIKYQLLDMTNEKVLAKGLVERIGIDGSRIVHKVNGEKHVLEHEIKNHEIGLKLVLDLLTDEKYGVLKDLKEIDAVGHRVVHGGERFASSVKITDEVLKTIETLSFLAPLHNPANIMGIKNSMKLLPGVPQVAVFDTAFHQKMPEKAYLYAIPYEYYEKYKIRRYGFHGTSHRYVSKRAAEIMGKPYDQLKIITVHVGNGASVAAVKNGVSVDTSMGFTPLEGLVMGTRSGDIDPAIVEFLEKEEGLSAKEVVNILNKKSGVYGLTKGFSSDMRDIEDNAIEGDPVCRLALDVYEYRIAKYIGAYAAAMNGVDAIVFTAGVGENSPIMREEIIENYLGYLGIKIDKEANDFKGEEKIISTPDSKVIAMVVPTNEELMIAKDTKEIVEKGLDELKI

SEQ ID NO: 295 - DNA, 1251 bp, synthetic construct
  misc_feature 1..1251: note = Variant of acetate kinase
  source 1..1251: mol_type = other DNA
atgcaccatcatcatcatcatggcggtagcggcatgaaagttctggtgattaattctggtagctcctccatcaaatatcagctcctcgatatgaccaacgaaaaggtattagcgaaaggcttggtcgagcgcattggcatcgacggttcgcgtatcgtgcataaagttaacggcgaaaaacacgtgctggaacatgagattaagaatcacgaaattggacttaaattggtcctggatcttcttacggacgaaaaatacggtgtgttgaaggatctcaaagaaatcgatgcagttgggcatcgcgtagtacatggcggcgagcgttttgccagtagcgtgaagattactgacgaagtcttaaagaccatcgagacgttgtcgttcttagctccgttacacaatccagtgaacattatgggtatcaagagcagcatgaaattattaccgggtgtgcctcaagttgccgtctttgatacagcgttccaccagaagatgccggagaaagcctatttgtacgcaatcccctatgagtactacgagaaatataaaattcgccgctatgggtttcatggaacctcacatcgttatgtgagtaaacgtgctgcggaaattatgggcaaaccgtacgatcagctcaagatcattaccgttcacgtgggtaacggcgcatcagttgcggcggtgaagaatggcgtatctgttgacacttccatgggtttcacaccacttgaaggtcttgtcatgggcacgcgcagcggcgatattgatccggccatcgtggaatttcttgagaaagaagaaggattgtcggccaaagaagtcgtcaacatcctcaacaagaaatctggtgtgtatgggctcaccaaaggctttagtagtgacatgcgtgacattgaagataatgctattgaaggtgatcctgtatgccgccttgcatttgatgtgtacgaatatcgtatcgcgaaatatattggcgcatacgctgcggccatgaacggtgttgacgcgatcgtctttaccgcaggagttggcgaaaatagcccgattatgcgccatgaaattattgagaactacttgggctacttagggatcaagatcgataaagaagccaatgacgttaaaggtgaggagaagatcatttcaacgcccgattccaaagtgattgcgatggtagttccgaccaacgaggagctcatgatcgccaaagacacgaaagaaatcattgagaaagggttggacgagcttaagatc

SEQ ID NO: 296 - protein, 417 aa, synthetic construct
  REGION 1..417: note = Variant of acetate kinase
MHHHHHHGGSGMKVLVINSGSSSIKYQLLDMTNEKVLAKGLVERIGIDGSRIVHKVNGEKHVLEHEIKNHEIGLKLVLDLLTDEKYGVLKDLKEIDAVGHRVVHGGERFASSVKITDEVLKTIETLSFLAPLHNPVNIMGIKSSMKLLPGVPQVAVFDTAFHQKMPEKAYLYAIPYEYYEKYKIRRYGFHGTSHRYVSKRAAEIMGKPYDQLKIITVHVGNGASVAAVKNGVSVDTSMGFTPLEGLVMGTRSGDIDPAIVEFLEKEEGLSAKEVVNILNKKSGVYGLTKGFSSDMRDIEDNAIEGDPVCRLAFDVYEYRIAKYIGAYAAAMNGVDAIVFTAGVGENSPIMRHEIIENYLGYLGIKIDKEANDVKGEEKIISTPDSKVIAMVVPTNEELMIAKDTKEIIEKGLDELKI

SEQ ID NO: 297 - DNA, 1251 bp, synthetic construct
  misc_feature 1..1251: note = Variant of acetate kinase
  source 1..1251: mol_type = other DNA
atgcaccatcatcatcatcatggcggtagcggcatgaaagttctggtgattaattctggtagctcctccatcaaatatcagctcctcgatatgaccaacgaaaaggtattagcgaaaggcttggtcgagcgcattggcatcgacggttcgcgtatcgtgcataaagttaacggcgaaaaacacgtgctggaacatgagattaagaatcacgaaattggacttaaattggtcctggatcttcttacggacgaaaaatacggtgtgttgaaggatctcaaagaaatcgatgcagttgggcatcgcgtagtacatggcggcgagcgttttgccagtagcgtgaagattactgacgaagtcttaaagaccatcgagacgttgtcgttcttagctccgttacacaatccagcgaacattatgggtatcaagagcagcatgaaagtgttaccgggtgtgcctcaagttgccgtctttgatacagcgttccaccagaagatgccggagaaagcctatttgtacgcaatcccctatgagtactacgagaaatataaaattcgccgctatgggtttcatggaacctcacatcgttatgtgagtaaacgtgctgcggaaattatgggcaaaccgtacgatcagctcaagatcattaccgttcacgtgggtaacggcgcatcagttgcggcggtgaagaatggcgtatctgttgacacttccatgggtttcacaccacttgaaggtcttgtcatgggcacgcgcagcggcgatattgatccggccatcgtggaatttcttgagaaagaagaaggattgtcggccaaagaagtcgtcaacatcctcaacaagaaatctggtgtgtatgggctcaccaaaggctttagtagtgacatgcgtgacattgaagataatgctattgaaggtgatcctgtatgccgccttgcatttgatgtgtacgaatatcgtatcgcgaaatatattggcgcatacgctgcggccatgaacggtgttgacgcgatcgtctttaccgcaggagttggcgaaaatagcccgattatgcgccatgaaattattgagaactacttgggctacttagggatcaagatcgataaagaagccaatgacttcaaaggtgaggagaagatcatttcaacgcccgattccaaagtgattgcgatggtagttccgaccaacgaggagctcatgatcgccaaagacacgaaagaaatcattgagaaagggttggacgagcttaagatc

SEQ ID NO: 298 - protein, 417 aa, synthetic construct
  REGION 1..417: note = Variant of acetate kinase
MHHHHHHGGSGMKVLVINSGSSSIKYQLLDMTNEKVLAKGLVERIGIDGSRIVHKVNGEKHVLEHEIKNHEIGLKLVLDLLTDEKYGVLKDLKEIDAVGHRVVHGGERFASSVKITDEVLKTIETLSFLAPLHNPANIMGIKSSMKVLPGVPQVAVFDTAFHQKMPEKAYLYAIPYEYYEKYKIRRYGFHGTSHRYVSKRAAEIMGKPYDQLKIITVHVGNGASVAAVKNGVSVDTSMGFTPLEGLVMGTRSGDIDPAIVEFLEKEEGLSAKEVVNILNKKSGVYGLTKGFSSDMRDIEDNAIEGDPVCRLAFDVYEYRIAKYIGAYAAAMNGVDAIVFTAGVGENSPIMRHEIIENYLGYLGIKIDKEANDFKGEEKIISTPDSKVIAMVVPTNEELMIAKDTKEIIEKGLDELKI

SEQ ID NO: 299 - DNA, 1251 bp, synthetic construct
  misc_feature 1..1251: note = Variant of acetate kinase
  source 1..1251: mol_type = other DNA
atgcaccatcatcatcatcatggcggtagcggcatgaaagttctggtgattaattctggtagctcctccatcaaatatcagctcctcgatatgaccaacgaaaaggtattagcgaaaggcttggtcgagcgcattggcatcgacggttcgcgtatcgtgcataaagttaacggcgaaaaacacgtgctggaacatgagattccgaatcacgaaattggacttaaattggtcctggatcttcttacggacgaaaaatacggtgtgttgaaggatctcaaagaaatcgatgcagttgggcatcgcgtagtacatggcggcgagcgttttgccagtagcgtgaagattactgacgaagtcttaaagaccatcgagacgttgtcgttcttagctccgttacacaatccagcgaacattatgggtatcaagagcagcatgaaattattaccgggtgtgcctcaagttgccgtctttgatacagcgttccaccagaagatgccggagaaagcctatttgtacgcaatcccctatgagtactacgagaaatataaaattcgccgctatgggtttcatggaacctcacatcgttatgtgagtaaacgtgctgcggaaattatgggcaaaccgtacgatcagctcaagatcattaccgttcacgtgggtaacggcgcatcagttgcggcggtgaagaatggcgtatctgttgacacttccatgggtttcacaccacttgaaggtcttgtcatgggcacgcgcagcggcgatattgatccggccatcgtggaatttcttgagaaagaagaaggattgtcggccaaagaagtcgtcaacatcctcaacaagaaatctggtgtgtatgggctcaccaaaggctttagtagtgacatgcgtgacattgaagataatgctattgaaggtgatcctgtatgccgccttgcattagatgtgtacgaatatcgtatcgcgaaatatattggcgcatacgctgcggccatgaacggtgttgacgcgatcgtctttaccgcaggagttggcgaaaatagcccgattatgcgcgaagaaattattgagaactacttgggctacttagggatcaagatcgataaagaagccaatgacttcaaaggtgaggagaagatcatttcaacgcccgattccaaagtgattgcgatggtagttccgaccaacgaggagctcatgatcgccaaagacacgaaagaaatcattgagaaagggttggacgagcttaagatc

SEQ ID NO: 300 - protein, 417 aa, synthetic construct
  REGION 1..417: note = Variant of acetate kinase
MHHHHHHGGSGMKVLVINSGSSSIKYQLLDMTNEKVLAKGLVERIGIDGSRIVHKVNGEKHVLEHEIPNHEIGLKLVLDLLTDEKYGVLKDLKEIDAVGHRVVHGGERFASSVKITDEVLKTIETLSFLAPLHNPANIMGIKSSMKLLPGVPQVAVFDTAFHQKMPEKAYLYAIPYEYYEKYKIRRYGFHGTSHRYVSKRAAEIMGKPYDQLKIITVHVGNGASVAAVKNGVSVDTSMGFTPLEGLVMGTRSGDIDPAIVEFLEKEEGLSAKEVVNILNKKSGVYGLTKGFSSDMRDIEDNAIEGDPVCRLALDVYEYRIAKYIGAYAAAMNGVDAIVFTAGVGENSPIMREEIIENYLGYLGIKIDKEANDFKGEEKIISTPDSKVIAMVVPTNEELMIAKDTKEIIEKGLDELKI

SEQ ID NO: 301 - DNA, 1251 bp, synthetic construct
  misc_feature 1..1251: note = Variant of acetate kinase
  source 1..1251: mol_type = other DNA
atgcaccatcatcatcatcatggcggtagcggcatgaaagttctggtgattaattctggtagctcctccatcaaatatcagctcctcgatatgaccaacgaaaaggtattagcgaaaggcttggtcgagcgcattggcatcgacggttcgcgtatcgtgcataaagttaacggcgaaaaacacgtgctggaacatgagattaagaatcacgaaattggacttaaattggtcctggatcttcttacggacgaaaaatacggtgtgttgaaggatctcaaagaaatcgatgcagttgggcatcgcgtagtacatggcggcgagcgttttgccagtagcgtgaagattactgacgaagtcttaaagaccatcgagacgttgtcgttcttagctccgttacacaatccagtgaacattatgggtatcaagagcagcatgaaactgttaccgggtgtgcctcaagttgccgtctttgatacagcgttccaccagaagatgccggagaaagcctatttgtacgcaatcccctatgagtactacgagaaatataaaattcgccgctatgggtttcatggaacctcacatcgttatgtgagtaaacgtgctgcggaaattctgggcaaaccgtacgatcagctcaagatcattaccgttcacgtgggtaacggcgcatcagttgcggcggtgaagaatggcgtatctgttgacacttccatgggtttcacaccacttgaaggtcttgtcatgggcacgcgcagcggcgatattgatccggccatcgtggaatttcttgagaaagaagaaggattgtcggccaaagaagtcgtcaacatcctcaacaagaaatctggtgtgtatgggctcaccaaaggctttagtagtgacatgcgtgacattgaagataatgctattgaaggtgatcctgtatgccgccttgcatttgatgtgtacgaatatcgtatcgcgaaatatattggcgcatacgctgcggccatgaacggtgttgacgcgatcgtctttaccgcaggagttggcgaaaatagcccgattatgcgcgaagaaattattgagaactacttgggctacttagggatcaagatcgataaagaagccaatgactttaaaggtgaggagaagatcatttcaacgcccgattccaaagtgattgcgatggtagttccgaccaacgaggagctcatgatcgccaaagacacgaaagaaatcgttgagaaagggttggacgagcttaagatc

SEQ ID NO: 302 - protein, 417 aa, synthetic construct
  REGION 1..417: note = Variant of acetate kinase
MHHHHHHGGSGMKVLVINSGSSSIKYQLLDMTNEKVLAKGLVERIGIDGSRIVHKVNGEKHVLEHEIKNHEIGLKLVLDLLTDEKYGVLKDLKEIDAVGHRVVHGGERFASSVKITDEVLKTIETLSFLAPLHNPVNIMGIKSSMKLLPGVPQVAVFDTAFHQKMPEKAYLYAIPYEYYEKYKIRRYGFHGTSHRYVSKRAAEILGKPYDQLKIITVHVGNGASVAAVKNGVSVDTSMGFTPLEGLVMGTRSGDIDPAIVEFLEKEEGLSAKEVVNILNKKSGVYGLTKGFSSDMRDIEDNAIEGDPVCRLAFDVYEYRIAKYIGAYAAAMNGVDAIVFTAGVGENSPIMREEIIENYLGYLGIKIDKEANDFKGEEKIISTPDSKVIAMVVPTNEELMIAKDTKEIVEKGLDELKI

SEQ ID NO: 303 - DNA, 1251 bp, synthetic construct
  misc_feature 1..1251: note = Variant of acetate kinase
  source 1..1251: mol_type = other DNA
atgcaccatcatcatcatcatggcggtagcggcatgaaagttctggtgattaattctggtagctcctccatcaaatatcagctcctcgatatgaccaacgaaaaggtattagcgaaaggcttggtcgagcgcattggcatcgacggttcgcgtatcgtgcataaagttaacggcgaaaaacacgtgctggaacatgagattccgaatcacgaaattggacttaaattggtcctggatcttcttacggacgaaaaatacggtgtgttgaaggatctcaaagaaatcgatgcagttgggcatcgcgtagtacatggcggcgagcgttttgccagtagcgtgaagattactgacgaagtcttaaagaccatcgagacgttgtcgttcttagctccgttacacaatccagtgaacattatgggtatcaagagcagcatgaaattattaccgggtgtgcctcaagttgccgtctttgatacagcgttccaccagaagatgccggagaaagcctatttgtacgcaatcccctatgagtactacgagaaatataaaattcgccgctatgggtttcatggaacctcacatcgttatgtgagtaaacgtgctgcggaaattatgggcaaaccgtacgatcagctcaagatcattaccgttcacgtgggtaacggcgcatcagttgcggcggtgaagaatggcgtatctgttgacacttccatgggtttcacaccacttgaaggtcttgtcatgggcacgcgcagcggcgatattgatccggccatcgtggaatttcttgagaaagaagaaggattgtcggccaaagaagtcgtcaacatcctcaacaagaaatctggtgtgtatgggctcaccaaaggctttagtagtgacatgcgtgacattgaagataatgctattgaaggtgatcctgtatgccgccttgcattcgatgtgtacgaatatcgtatcgcgaaatatattggcgcatacgctgcggccatgaacggtgttgacgcgatcgtctttaccgcaggagttggcgaaaatagcccgattatgcgcgaagaaattattgagaactacttgggctacttagggatcaagatcgataaagaagccaatgactttaaaggtgaggagaagatcatttcaacgcccgattccaaagtgattgcgatggtagttccgaccaacgaggagctcatgatcgccaaagacacgaaagaaatcgttgagaaagggttggacgagcttaagatc

SEQ ID NO: 304 - protein, 417 aa, synthetic construct
  REGION 1..417: note = Variant of acetate kinase
MHHHHHHGGSGMKVLVINSGSSSIKYQLLDMTNEKVLAKGLVERIGIDGSRIVHKVNGEKHVLEHEIPNHEIGLKLVLDLLTDEKYGVLKDLKEIDAVGHRVVHGGERFASSVKITDEVLKTIETLSFLAPLHNPVNIMGIKSSMKLLPGVPQVAVFDTAFHQKMPEKAYLYAIPYEYYEKYKIRRYGFHGTSHRYVSKRAAEIMGKPYDQLKIITVHVGNGASVAAVKNGVSVDTSMGFTPLEGLVMGTRSGDIDPAIVEFLEKEEGLSAKEVVNILNKKSGVYGLTKGFSSDMRDIEDNAIEGDPVCRLAFDVYEYRIAKYIGAYAAAMNGVDAIVFTAGVGENSPIMREEIIENYLGYLGIKIDKEANDFKGEEKIISTPDSKVIAMVVPTNEELMIAKDTKEIVEKGLDELKI

SEQ ID NO: 305 - DNA, 1251 bp, synthetic construct
  misc_feature 1..1251: note = Variant of acetate kinase
  source 1..1251: mol_type = other DNA
atgcaccatcatcatcatcatggcggtagcggcatgaaagttctggtgattaattctggtagctcctccatcaaatatcagctcctcgatatgaccaacgaaaaggtattagcgaaaggcttggtcgagcgcattggcatcgacggttcgcgtatcgtgcataaagttaacggcgaaaaacacgtgctggaacatgagattaagaatcacgaaattggacttaaattggtcctggatcttcttacggacgaaaaatacggtgtgttgaaggatctcaaagaaatcgatgcagttgggcatcgcgtagtacatggcggcgagcgttttgccagtagcgtgaagattactgacgaagtcttaaagaccatcgagacgttgtcgttcttagctccgttacacaatccagcgaacattatgggtatcaagagcagcatgaaactgttaccgggtgtgcctcaagttgccgtctttgatacagcgttccaccagaagatgccggagaaagcctatttgtacgcaatcccctatgagtactacgagaaatataaaattcgccgctatgggtttcatggaacctcacatcgttatgtgagtaaacgtgctgcggaaattatgggcaaaccgtacgatcagctcaagatcattaccgttcacgtgggtaacggcgcatcagttgcggcggtgaagaatggcgtatctgttgacacttccatgggtttcacaccacttgaaggtcttgtcatgggcacgcgcagcggcgatattgatccggccatcgtggaatttcttgagaaagaagaaggattgtcggccaaagaagtcgtcaacatcctcaacaagaaatctggtgtgtatgggctcaccaaaggctttagtagtgacatgcgtgacattgaagataatgctattgaaggtgatcctgtatgccgccttgcattagatgtgtacgaatatcgtatcgcgaaatatattggcgcatacgctgcggccatgaacggtgttgacgcgatcgtctttaccgcaggagttggcgaaaatagcccgattatgcgcgaagaaattattgagaactacttgggctacttagggatcaagatcgataaagaagccaatgacttcaaaggtgaggagaagatcatttcaacgcccgattccaaagtgattgcgatggtagttccgaccaacgaggagctcatgatcgccaaagacacgaaagaaatcgttgagaaagggttggacgagcttaagatc

SEQ ID NO: 306 - protein, 417 aa, synthetic construct
  REGION 1..417: note = Variant of acetate kinase
MHHHHHHGGSGMKVLVINSGSSSIKYQLLDMTNEKVLAKGLVERIGIDGSRIVHKVNGEKHVLEHEIKNHEIGLKLVLDLLTDEKYGVLKDLKEIDAVGHRVVHGGERFASSVKITDEVLKTIETLSFLAPLHNPANIMGIKSSMKLLPGVPQVAVFDTAFHQKMPEKAYLYAIPYEYYEKYKIRRYGFHGTSHRYVSKRAAEIMGKPYDQLKIITVHVGNGASVAAVKNGVSVDTSMGFTPLEGLVMGTRSGDIDPAIVEFLEKEEGLSAKEVVNILNKKSGVYGLTKGFSSDMRDIEDNAIEGDPVCRLALDVYEYRIAKYIGAYAAAMNGVDAIVFTAGVGENSPIMREEIIENYLGYLGIKIDKEANDFKGEEKIISTPDSKVIAMVVPTNEELMIAKDTKEIVEKGLDELKI

SEQ ID NO: 307 - DNA, 1251 bp, synthetic construct
  misc_feature 1..1251: note = Variant of acetate kinase
  source 1..1251: mol_type = other DNA
atgcaccatcatcatcatcatggcggtagcggcatgaaagttctggtgattaattctggtagctcctccatcaaatatcagctcctcgatatgaccaacgaaaaggtattagcgaaaggcttggtcgagcgcattggcatcgacggttcgcgtattgtgcataaagttaacggcgaaaaacacgtgctggaacatgagattaaggatcacgaaattggacttaaattggtcctggatcttcttacggacgaaaaatacggtgtgttgaaggatctcaaagaaatcgatgcagttgggcatcgcgtagtacatggcggcgagcgttttgccagtagcgtgaagattactgacgaagtcttaaagaccatcgagacgttgtcgttcttagctccgttacacaatccagcgaacattatgggtatcaagagcagcatgaaattaatgccgggtgtgcctcaagttgccgtctttgatacagcgttccaccagaagatgccggagaaagcctatttgtacgcaatcccctatgagtactacgagaaatataaaattcgccgctatgggtttcatggaacctcacatcgttatgtgagtaaacgtgctgcggaaattatgggcaaaccgtacgatcagctcaagatcattaccgttcacgtgggtaacggcgcatcagttgcggcggtgaagaatggcgtatctgttgacacttccatgggtttcacaccacttgaaggtcttgtcatgggcacgcgcagcggcgatattgatccggccatcgtggaatttcttgagaaagaagaaggattgtcggccaaagaagtcgtcaacatcctcaacaagaaatctggtgtgtatgggctcaccaaaggctttagtagtgacatgcgtgacattgaagataatgctattgaaggtgatcctgtatgccgccttgcattcgatgtgtacgaatatcgtatcgcgaaatatattggcgcatacgctgcggccatgaacggtgttgacgcgatcgtctttaccgcaggagttggcgaaaatagcccgattatgcgcgaagaaattattgagaactacttgggctacttagggatcaagatcgataaagaagccaatgatttcaaaggtgaggagaagatcatttcaacgcccgattccaaagtgattgcgatggtagttccgaccaacgaggagctcatgatcgccaaagacacgaaagaaatcattgagaaagggttggacgagcttaagatc

SEQ ID NO: 308 - protein, 417 aa, synthetic construct
  REGION 1..417: note = Variant of acetate kinase
MHHHHHHGGSGMKVLVINSGSSSIKYQLLDMTNEKVLAKGLVERIGIDGSRIVHKVNGEKHVLEHEIKDHEIGLKLVLDLLTDEKYGVLKDLKEIDAVGHRVVHGGERFASSVKITDEVLKTIETLSFLAPLHNPANIMGIKSSMKLMPGVPQVAVFDTAFHQKMPEKAYLYAIPYEYYEKYKIRRYGFHGTSHRYVSKRAAEIMGKPYDQLKIITVHVGNGASVAAVKNGVSVDTSMGFTPLEGLVMGTRSGDIDPAIVEFLEKEEGLSAKEVVNILNKKSGVYGLTKGFSSDMRDIEDNAIEGDPVCRLAFDVYEYRIAKYIGAYAAAMNGVDAIVFTAGVGENSPIMREEIIENYLGYLGIKIDKEANDFKGEEKIISTPDSKVIAMVVPTNEELMIAKDTKEIIEKGLDELKI

SEQ ID NO: 309 - DNA, 1251 bp, synthetic construct
  misc_feature 1..1251: note = Variant of acetate kinase
  source 1..1251: mol_type = other DNA
atgcaccatcatcatcatcatggcggtagcggcatgaaagttctggtgattaattctggtagctcctccatcaaatatcagctcctcgatatgaccaacgaaaaggtattagcgaaaggcttggtcgagcgcattggcatcgacggttcgcgtcttgtgcataaagttaacggcgaaaaacacgtgctggaacatgagattaagaatcacgaaattggacttaaattggtcctggatcttcttacggacgaaaaatacggtgtgttgaaggatctcaaagaaatcgatgcagttgggcatcgcgtagtacatggcggcgagcgttttgccagtagcgtgaagattactgacgaagtcttaaagaccatcgagacgttgtcgttcttagctccgttacacaatccagcgaacattatgggtatcaagagcagcatgaaattattaccgggtgtgcctcaagttgccgtctttgatacagcgttccaccagaagatgccggagaaagcctatttgtacgcaatcccctatgagtactacgagaaatataaaattcgccgctatgggtttcatggaacctcacatcgttatgtgagtaaacgtgctgcggaaattatgggcaaaccgtacgatcagctcaagatcattaccgttcacgtgggtaacggcgcatcagttgcggcggtgaagaatggcgtatctgttgacacttccatgggtttcacaccacttgaaggtcttgtcatgggcacgcgcagcggcgatattgatccggccatcgtggaatttcttgagaaagaagaaggattgtcggccaaagaagtcgtcaacatcctcaacaagaaatctggtgtgtatgggctcaccaaaggctttagtagtgacatgcgtgacattgaagataatgctattgaaggtgatcctgtatgccgccttgcattcgatgtgtacgaatatcgtatcgcgaaatatattggcgcatacgctgcggccatgaacggtgttgacgcgatcgtctttaccgcaggagttggcgaaaatagcccgattatgcgcgaagaaattattgagaactacttgggctacttagggatcaagatcgataaagaagccaatcgcttcaaaggtgaggagaagatcatttcaacgcccgattccaaagtgattgcgatggtaattccgaccaacgaggagctcatgatcgccaaagacacgaaagaaatcattgagaaagggttggacgagcttaagatc

SEQ ID NO: 310 - protein, 417 aa, synthetic construct
  REGION 1..417: note = Variant of acetate kinase
MHHHHHHGGSGMKVLVINSGSSSIKYQLLDMTNEKVLAKGLVERIGIDGSRLVHKVNGEKHVLEHEIKNHEIGLKLVLDLLTDEKYGVLKDLKEIDAVGHRVVHGGERFASSVKITDEVLKTIETLSFLAPLHNPANIMGIKSSMKLLPGVPQVAVFDTAFHQKMPEKAYLYAIPYEYYEKYKIRRYGFHGTSHRYVSKRAAEIMGKPYDQLKIITVHVGNGASVAAVKNGVSVDTSMGFTPLEGLVMGTRSGDIDPAIVEFLEKEEGLSAKEVVNILNKKSGVYGLTKGFSSDMRDIEDNAIEGDPVCRLAFDVYEYRIAKYIGAYAAAMNGVDAIVFTAGVGENSPIMREEIIENYLGYLGIKIDKEANRFKGEEKIISTPDSKVIAMVIPTNEELMIAKDTKEIIEKGLDELKI

SEQ ID NO: 311 - DNA, 1251 bp, synthetic construct
  misc_feature 1..1251: note = Variant of acetate kinase
  source 1..1251: mol_type = other DNA
atgcaccatcatcatcatcatggcggtagcggcatgaaagttctggtgattaattctggtagctcctccatcaaatatcagctcctcgatatgaccaacgaaaaggtattagcgaaaggcttggtcgagcgcattggcatcgacggttcgcgtattgtgcataaagttaacggcgaaaaacacgtgctggaacatgagattaagaatcacgaaattggacttaaattggtcctggatcttcttacggacgaaaaatacggtgtgttgaaggatctcaaagaaatcgatgcagttgggcatcgcgtagtacatggcggcgagcgttttgccagtagcgtgaagattactgacgaagtcttaaagaccatcgagacgttgtcgttcttagctccgttacacaatccagcgaacattatgggtatcaagagcagcatgaaattaatgccgggtgtgcctcaagttgccgtctttgatacagcgttccaccagaagatgccggagaaagcctatttgtacgcaatcccctatgagtactacgagaaatataaaattcgccgctatgggtttcatggaacctcacatcgttatgtgagtaaacgtgctgcggaaattatgggcaaaccgtacgatcagctcaagatcattaccgttcacgtgggtaacggcgcatcagttgcggcggtgaagaatggcgtatctgttgacacttccatgggtttcacaccacttgaaggtcttgtcatgggcacgcgcagcggcgatattgatccggccatcgtggaatttcttgagaaagaagaaggattgtcggccaaagaagtcgtcaacatcctcaacaagaaatctggtgtgtatgggctcaccaaaggctttagtagtgacatgcgtgacattgaagataatgctattgaaggtgatcctgtatgccgccttgcattcgatgtgtacgaatatcgtatcgcgaaatatattggcgcatacgctgcggccatgaacggtgttgacgcgatcgtctttaccgcaggagttggcgaaaatagcccgattatgcgcgaagaaattattgagaactacttgggctacttagggatcaagatcgataaagaagccaatgatttcaaaggtgaggagaagatcatttcaacgcccgattccaaagtgattgcgatggtaattccgaccaacgaggagctcatgatcgccaaagacacgaaagaaatcattgagaaagggttggacgagcttaagatc

SEQ ID NO: 312 - protein, 417 aa, synthetic construct
  REGION 1..417: note = Variant of acetate kinase
MHHHHHHGGSGMKVLVINSGSSSIKYQLLDMTNEKVLAKGLVERIGIDGSRIVHKVNGEKHVLEHEIKNHEIGLKLVLDLLTDEKYGVLKDLKEIDAVGHRVVHGGERFASSVKITDEVLKTIETLSFLAPLHNPANIMGIKSSMKLMPGVPQVAVFDTAFHQKMPEKAYLYAIPYEYYEKYKIRRYGFHGTSHRYVSKRAAEIMGKPYDQLKIITVHVGNGASVAAVKNGVSVDTSMGFTPLEGLVMGTRSGDIDPAIVEFLEKEEGLSAKEVVNILNKKSGVYGLTKGFSSDMRDIEDNAIEGDPVCRLAFDVYEYRIAKYIGAYAAAMNGVDAIVFTAGVGENSPIMREEIIENYLGYLGIKIDKEANDFKGEEKIISTPDSKVIAMVIPTNEELMIAKDTKEIIEKGLDELKI

SEQ ID NO: 313 - DNA, 1251 bp, synthetic construct
  misc_feature 1..1251: note = Variant of acetate kinase
  source 1..1251: mol_type = other DNA
atgcaccatcataatcatcatggcggtagcggcatgaaagttctggtgattaattctggtagctcctccatcaaatatcagctcctcgatatgaccaacgaaaaggtattagcgaaaggcttggtcgagcgcattggcatcgacggttcgcgtcttgtgcataaagttaacggcgaaaaacacgtgctggaacatgagattaaggatcacgaaattggacttaaattggtcctggatcttcttacggacgaaaaatacggtgtgttgaaggatctcaaagaaatcgatgcagttgggcatcgcgtagtacatggcggcgagcgttttgccagtagcgtgaagattactgacgaagtcttaaagaccatcgagacgttgtcgttcttagctccgttacacaatccagcgaacattatgggtatcaagagcagcatgaaattactgccgggtgtgcctcaagttgccgtctttgatacagcgttccaccagaagatgccggagaaagcctatttgtacgcaatcccctatgagtactacgagaaatataaaattcgccgctatgggtttcatggaacctcacatcgttatgtgagtaaacgtgctgcggaaattatgggcaaaccgtacgatcagctcaagatcattaccgttcacgtgggtaacggcgcatcagttgcggcggtgaagaatggcgtatctgttgacacttccatgggtttcacaccacttgaaggtcttgtcatgggcacgcgcagcggcgatattgatccggccatcgtggaatttcttgagaaagaagaaggattgtcggccaaagaagtcgtcaacatcctcaacaagaaatctggtgtgtatgggctcaccaaaggctttagtagtgacatgcgtgacattgaagataatgctattgaaggtgatcctgtatgccgccttgcattcgatgtgtacgaatatcgtatcgcgaaatatattggcgcatacgctgcggccatgaacggtgttgacgcgatcgtctttaccgcaggagttggcgaaaatagcccgattatgcgcgaagaaattattgagaactacttgggctacttagggatcaagatcgataaagaagccaatcgcttcaaaggtgaggagaagatcatttcaacgcccgattccaaagtgattgcgatggtaattccgaccaacgaggagctcatgatcgccaaagacacgaaagaaatcattgagaaagggttggacgagcttaagatc

SEQ ID NO: 314 - protein, 417 aa, synthetic construct
  REGION 1..417: note = Variant of acetate kinase
MHHHNHHGGSGMKVLVINSGSSSIKYQLLDMTNEKVLAKGLVERIGIDGSRLVHKVNGEKHVLEHEIKDHEIGLKLVLDLLTDEKYGVLKDLKEIDAVGHRVVHGGERFASSVKITDEVLKTIETLSFLAPLHNPANIMGIKSSMKLLPGVPQVAVFDTAFHQKMPEKAYLYAIPYEYYEKYKIRRYGFHGTSHRYVSKRAAEIMGKPYDQLKIITVHVGNGASVAAVKNGVSVDTSMGFTPLEGLVMGTRSGDIDPAIVEFLEKEEGLSAKEVVNILNKKSGVYGLTKGFSSDMRDIEDNAIEGDPVCRLAFDVYEYRIAKYIGAYAAAMNGVDAIVFTAGVGENSPIMREEIIENYLGYLGIKIDKEANRFKGEEKIISTPDSKVIAMVIPTNEELMIAKDTKEIIEKGLDELKI

SEQ ID NO: 315 - DNA, 1251 bp, synthetic construct
  misc_feature 1..1251: note = Variant of acetate kinase
  source 1..1251: mol_type = other DNA
atgcaccatcatcatcatcatggcggtagcggcatgaaagttctggtgattaattctggtagctcctccatcaaatatcagctcctcgatatgaccaacgaaaaggtattagcgaaaggcttggtcgagcgcattggcatcgacggttcgcgtattgtgcataaagttaacggcgaaaaacacgtgctggaacatgagattaaggatcacgaaattggacttaaattggtcctggatcttcttacggacgaaaaatacggtgtgttgaaggatctcaaagaaatcgatgcagttgggcatcgcgtagtacatggcggcgagcgttttgccagtagcgtgaagattactgacgaagtcttaaagaccatcgagacgttgtcgttcttagctccgttacacaatccactgaacattatgggtatcaagagcagcatgaaattattaccgggtgtgcctcaagttgccgtctttgatacagcgttccaccagaagatgccggagaaagcctatttgtacgcaatcccctatgagtactacgagaaatataaaattcgccgctatgggtttcatggaacctcacatcgttatgtgagtaaacgtgctgcggaaattatgggcaaaccgtacgatcagctcaagatcattaccgttcacgtgggtaacggcgcatcagttgcggcggtgaagaatggcgtatctgttgacacttccatgggtttcacaccacttgaaggtcttgtcatgggcacgcgcagcggcgatattgatccggccatcgtggaatttcttgagaaagaagaaggattgtcggccaaagaagtcgtcaacatcctcaacaagaaatctggtgtgtatgggctcaccaaaggctttagtagtgacatgcgtgacattgaagataatgctattgaaggtgatcctgtatgccgccttgcattcgatgtgtacgaatatcgtatcgcgaaatatattggcgcatacgctgcggccatgaacggtgttgacgcgatcgtctttaccgcaggagttggcgaaaatagccgcattatgcgcgaagaaattattgagaactacttgggctacttagggatcaagatcgataaagaagccaatgacttcaaaggtgaggagaagatcatttcaacgcccgattccaaagtgattgcgatggtagttccgaccaacgaggagctcatgatcgccaaagacacgaaagaaatcattgagaaagggttggacgagcttaagatc

SEQ ID NO: 316 - protein, 417 aa, synthetic construct
  REGION 1..417: note = Variant of acetate kinase
MHHHHHHGGSGMKVLVINSGSSSIKYQLLDMTNEKVLAKGLVERIGIDGSRIVHKVNGEKHVLEHEIKDHEIGLKLVLDLLTDEKYGVLKDLKEIDAVGHRVVHGGERFASSVKITDEVLKTIETLSFLAPLHNPLNIMGIKSSMKLLPGVPQVAVFDTAFHQKMPEKAYLYAIPYEYYEKYKIRRYGFHGTSHRYVSKRAAEIMGKPYDQLKIITVHVGNGASVAAVKNGVSVDTSMGFTPLEGLVMGTRSGDIDPAIVEFLEKEEGLSAKEVVNILNKKSGVYGLTKGFSSDMRDIEDNAIEGDPVCRLAFDVYEYRIAKYIGAYAAAMNGVDAIVFTAGVGENSRIMREEIIENYLGYLGIKIDKEANDFKGEEKIISTPDSKVIAMVVPTNEELMIAKDTKEIIEKGLDELKI

SEQ ID NO: 317 - DNA, 1251 bp, synthetic construct
  misc_feature 1..1251: note = Variant of acetate kinase
  source 1..1251: mol_type = other DNA
atgcaccatcatcatcatcatggcggtagcggcatgaaagttctggtgattaattctggtagctcctccatcaaatatcagctcctcgatatgaccaacgaaaaggtattagcgaaaggcttggtcgagcgcattggcatcgacggttcgcgtattgtgcataaagttaacggcgaaaaacacgtgctggaacatgagattaagaatcacgaaattggacttaaattggtcctggatcttcttacggacgaaaaatacggtgtgttgaaggatctcaaagaaatcgatgcagttgggcatcgcgtagtacatggcggcgagcgttttgccagtagcgtgaagattactgacgaagtcttaaagaccatcgagacgttgtcgttcttagctccgttacacaatccactgaacattatgggtatcaagagcagcatgaaattattaccgggtgtgcctcaagttgccgtctttgatacagcgttccaccagaagatgccggagaaagcctatttgtacgcaatcccctatgagtactacgagaaatataaaattcgccgctatgggtttcatggaacctcacatcgttatgtgagtaaacgtgctgcggaaattatgggcaaaccgtacgatcagctcaagatcattaccgttcacgtgggtaacggcgcatcagttgcggcggtgaagaatggcgtatctgttgacacttccatgggtttcacaccacttgaaggtcttgtcatgggcacgcgcagcggcgatattgatccggccatcgtggaatttcttgagaaagaagaaggattgtcggccaaagaagtcgtcaacatcctcaacaagaaatctggtgtgtatgggctcaccaaaggctttagtagtgacatgcgtgacattgaagataatgctattgaaggtgatcctgtatgccgccttgcattcgatgtgtacgaatatcgtatcgcgaaatatattggcgcatacgctgcggccatgaacggtgttgacgcgatcgtctttaccgcaggagttggcgaaaatagccgcattatgcgcgaagaaattattgagaactacttgggctacttagggatcaagatcgataaagaagccaatgacttcaaaggtgaggagaagatcatttcaacgcccgattccaaagtgattgcgatggtaattccgaccaacgaggagctcatgatcgccaaagacacgaaagaaatcattgagaaagggttggacgagcttaagatc

SEQ ID NO: 318 - protein, 417 aa, synthetic construct
  REGION 1..417: note = Variant of acetate kinase
MHHHHHHGGSGMKVLVINSGSSSIKYQLLDMTNEKVLAKGLVERIGIDGSRIVHKVNGEKHVLEHEIKNHEIGLKLVLDLLTDEKYGVLKDLKEIDAVGHRVVHGGERFASSVKITDEVLKTIETLSFLAPLHNPLNIMGIKSSMKLLPGVPQVAVFDTAFHQKMPEKAYLYAIPYEYYEKYKIRRYGFHGTSHRYVSKRAAEIMGKPYDQLKIITVHVGNGASVAAVKNGVSVDTSMGFTPLEGLVMGTRSGDIDPAIVEFLEKEEGLSAKEVVNILNKKSGVYGLTKGFSSDMRDIEDNAIEGDPVCRLAFDVYEYRIAKYIGAYAAAMNGVDAIVFTAGVGENSRIMREEIIENYLGYLGIKIDKEANDFKGEEKIISTPDSKVIAMVIPTNEELMIAKDTKEIIEKGLDELKI

SEQ ID NO: 319 - DNA, 1251 bp, synthetic construct
  misc_feature 1..1251: note = Variant of acetate kinase
  source 1..1251: mol_type = other DNA
atgcaccatcatcatcatcatggcggtagcggcatgaaagttctggtgattaattctggtagctcctccatcaaatatcagctcctcgatatgaccaacgaaaaggtattagcgaaaggcttggtcgagcgcattggcatcgacggttcgcgtatcgtgcataaagttaacggcgaaaaacacgtgctggaacatgagattaagaatcacgaaattggacttaaattggtcctggatcttcttacggacgaaaaatacggtgtgttgaaggatctcaaagaaatcgatgcagttgggcatcgcgtagtacatggcggcgagcgttttgccagtagcgtgaagattactgacgaagtcttaaagaccatcgagacgttgtcgttcttagctccgttacacaatccagtgaacattatgggtatcaagagcagcatgaaactgttaccgggtgtgcctcaagttgccgtctttgatacagcgttccaccagaagatgccggagaaagcctatttgtacgcaatcccctatgagtactacgagaaatataaaattcgccgctatgggtttcatggaacctcacatcgttatgtgagtaaacgtgctgcggaaattatgggcaaaccgtacgatcagctcaagatcattaccgttcacgtgggtaacggcgcatcagttgcggcggtgaagaatggcgtatctgttgacacttccatgggtttcacaccacttgaaggtcttgtcatgggcacgcgcagcggcgatattgatccggccatcgtggaatttcttgagaaagaagaaggattgtcggccaaagaagtcgtcaacatcctcaacaagaaatctggtgtgtatgggctcaccaaaggctttagtagtgacatgcgtgacattgaagataatgctattgaaggtgatcctgtatgccgccttgcattagatgtgtacgaatatcgtatcgcgaaatatattggcgcatacgctgcggccatgaacggtgttgacgcgatcgtctttaccgcaggagttggcgaaaatagcccgattatgcgccatgaaattattgagaactacttgggctacttagggatcaagatcgataaagaagccaatgacttcaaaggtgaggagaagatcatttcaacgcccgattccaaagtgattgcgatggtagttccgaccaacgaggagctcatgatcgccaaagacacgaaagaaatcattgagaaagggttggacgagcttaagatc

SEQ ID NO: 320 - protein, 417 aa, synthetic construct
  REGION 1..417: note = Variant of acetate kinase
MHHHHHHGGSGMKVLVINSGSSSIKYQLLDMTNEKVLAKGLVERIGIDGSRIVHKVNGEKHVLEHEIKNHEIGLKLVLDLLTDEKYGVLKDLKEIDAVGHRVVHGGERFASSVKITDEVLKTIETLSFLAPLHNPVNIMGIKSSMKLLPGVPQVAVFDTAFHQKMPEKAYLYAIPYEYYEKYKIRRYGFHGTSHRYVSKRAAEIMGKPYDQLKIITVHVGNGASVAAVKNGVSVDTSMGFTPLEGLVMGTRSGDIDPAIVEFLEKEEGLSAKEVVNILNKKSGVYGLTKGFSSDMRDIEDNAIEGDPVCRLALDVYEYRIAKYIGAYAAAMNGVDAIVFTAGVGENSPIMRHEIIENYLGYLGIKIDKEANDFKGEEKIISTPDSKVIAMVVPTNEELMIAKDTKEIIEKGLDELKI

SEQ ID NO: 321 - DNA, 1251 bp, synthetic construct
  misc_feature 1..1251: note = Variant of acetate kinase
  source 1..1251: mol_type = other DNA
atgcaccatcatcatcatcatggcggtagcggcatgaaagttctggtgattaattctggtagctcctccatcaaatatcagctcctcgatatgaccaacgaaaaggtattagcgaaaggcttggtcgagcgcattggcatcgacggttcgcgtcttgtgcataaagttaacggcgaaaaacacgtgctggaacatgagattaagaatcacgaaattggacttaaattggtcctggatcttcttacggacgaaaaatacggtgtgttgaaggatctcaaagaaatcgatgcagttgggcatcgcgtagtacatggcggcgagcgttttgccagtagcgtgaagattactgacgaagtcttaaagaccatcgagacgttgtcgttcttagctccgttacacaatccagcgaacattatgggtatcaagagcagcatgaaattaatgccgggtgtgcctcaagttgccgtctttgatacagcgttccaccagaagatgccggagaaagcctatttgtacgcaatcccctatgagtactacgagaaatataaaattcgccgctatgggtttcatggaacctcacatcgttatgtgagtaaacgtgctgcggaaattatgggcaaaccgtacgatcagctcaagatcattaccgttcacgtgggtaacggcgcatcagttgcggcggtgaagaatggcgtatctgttgacacttccatgggtttcacaccacttgaaggtcttgtcatgggcacgcgcagcggcgatattgatccggccatcgtggaatttcttgagaaagaagaaggattgtcggccaaagaagtcgtcaacatcctcaacaagaaatctggtgtgtatgggctcaccaaaggctttagtagtgacatgcgtgacattgaagataatgctattgaaggtgatcctgtatgccgccttgcattcgatgtgtacgaatatcgtatcgcgaaatatattggcgcatacgctgcggccatgaacggtgttgacgcgatcgtctttaccgcaggagttggcgaaaatagccgcattatgcgcgaagaaattattgagaactacttgggctacttagggatcaagatcgataaagaagccaatgacttcaaaggtgaggagaagatcatttcaacgcccgattccaaagtgattgcgatggtagttccgaccaacgaggagctcatgatcgccaaagacacgaaagaaatcattgagaaagggttggacgagcttaagatc

SEQ ID NO: 322 - protein, 417 aa, synthetic construct
  REGION 1..417: note = Variant of acetate kinase
MHHHHHHGGSGMKVLVINSGSSSIKYQLLDMTNEKVLAKGLVERIGIDGSRLVHKVNGEKHVLEHEIKNHEIGLKLVLDLLTDEKYGVLKDLKEIDAVGHRVVHGGERFASSVKITDEVLKTIETLSFLAPLHNPANIMGIKSSMKLMPGVPQVAVFDTAFHQKMPEKAYLYAIPYEYYEKYKIRRYGFHGTSHRYVSKRAAEIMGKPYDQLKIITVHVGNGASVAAVKNGVSVDTSMGFTPLEGLVMGTRSGDIDPAIVEFLEKEEGLSAKEVVNILNKKSGVYGLTKGFSSDMRDIEDNAIEGDPVCRLAFDVYEYRIAKYIGAYAAAMNGVDAIVFTAGVGENSRIMREEIIENYLGYLGIKIDKEANDFKGEEKIISTPDSKVIAMVVPTNEELMIAKDTKEIIEKGLDELKI

SEQ ID NO: 323 - DNA, 1251 bp, synthetic construct
  misc_feature 1..1251: note = Variant of acetate kinase
  source 1..1251: mol_type = other DNA
atgcaccatcatcatcatcatggcggtagcggcatgaaagttctggtgattaattctggtagctcctccatcaaatatcagctcctcgatatgaccaacgaaaaggtattagcgaaaggcttggtcgagcgcattggcatcgacggttcgcgtatcgtgcataaagttaacggcgaaaaacacgtgctggaacatgagattaagaatcacgaaattggacttaaattggtcctggatcttcttacggacgaaaaatacggtgtgttgaaggatctcaaagaaatcgatgcagttgggcatcgcgtagtacatggcggcgagcgttttgccagtagcgtgaagattactgacgaagtcttaaagaccatcgagacgttgtcgttcttagctccgttacacaatccagtgaacattatgggtatcaagagcagcatgaaattattaccgggtgtgcctcaagttgccgtctttgatacagcgttccaccagaagatgccggagaaagcctatttgtacgcaatcccctatgagtactacgagaaatataaaattcgccgctatgggtttcatggaacctcacatcgttatgtgagtaaacgtgctgcggaaattatgggcaaaccgtacgatcagctcaagatcattaccgttcacgtgggtaacggcgcatcagttgcggcggtgaagaatggcgtatctgttgacacttccatgggtttcacaccacttgaaggtcttgtcatgggcacgcgcagcggcgatattgatccggccatcgtggaatttcttgagaaagaagaaggattgtcggccaaagaagtcgtcaacatcctcaacaagaaatctggtgtgtatgggctcaccaaaggctttagtagtgacatgcgtgacattgaagataatgctattgaaggtgatcctgtatgccgccttgcattagatgtgtacgaatatcgtatcgcgaaatatattggcgcatacgctgcggccatgaacggtgttgacgcgatcgtctttaccgcaggagttggcgaaaatagcccgattatgcgcgaagaaattattgagaactacttgggctacttagggatcaagatcgataaagaagccaatgacttcaaaggtgaggagaagatcatttcaacgcccgattccaaagtgattgcgatggtagttccgaccaacgaggagctcatgatcgccaaagacacgaaagaaatcattgagaaagggttggacgagcttaagatc

SEQ ID NO: 324 - protein, 417 aa, synthetic construct
  REGION 1..417: note = Variant of acetate kinase
MHHHHHHGGSGMKVLVINSGSSSIKYQLLDMTNEKVLAKGLVERIGIDGSRIVHKVNGEKHVLEHEIKNHEIGLKLVLDLLTDEKYGVLKDLKEIDAVGHRVVHGGERFASSVKITDEVLKTIETLSFLAPLHNPVNIMGIKSSMKLLPGVPQVAVFDTAFHQKMPEKAYLYAIPYEYYEKYKIRRYGFHGTSHRYVSKRAAEIMGKPYDQLKIITVHVGNGASVAAVKNGVSVDTSMGFTPLEGLVMGTRSGDIDPAIVEFLEKEEGLSAKEVVNILNKKSGVYGLTKGFSSDMRDIEDNAIEGDPVCRLALDVYEYRIAKYIGAYAAAMNGVDAIVFTAGVGENSPIMREEIIENYLGYLGIKIDKEANDFKGEEKIISTPDSKVIAMVVPTNEELMIAKDTKEIIEKGLDELKI

SEQ ID NO: 325 - DNA, 1251 bp, synthetic construct
  misc_feature 1..1251: note = Variant of acetate kinase
  source 1..1251: mol_type = other DNA
atgcaccatcatcatcatcatggcggtagcggcatgaaagttctggtgattaattctggtagctcctccatcaaatatcagctcctcgatatgaccaacgaaaaggtattagcgaaaggcttggtcgagcgcattggcatcgacggttcgcgtcttgtgcataaagttaacggcgaaaaacacgtgctggaacatgagattaagaatcacgaaattggacttaaattggtcctggatcttcttacggacgaaaaatacggtgtgttgaaggatctcaaagaaatcgatgcagttgggcatcgcgtagtacatggcggcgagcgttttgccagtagcgtgaagattactgacgaagtcttaaagaccatcgagacgttgtcgttcttagctccgttacacaatccagcgaacattatgggtatcaagagcagcatgaaattaatgccgggtgtgcctcaagttgccgtctttgatacagcgttccaccagaagatgccggagaaagcctatttgtacgcaatcccctatgagtactacgagaaatataaaattcgccgctatgggtttcatggaacctcacatcgttatgtgagtaaacgtgctgcggaaattatgggcaaaccgtacgatcagctcaagatcattaccgttcacgtgggtaacggcgcatcagttgcggcggtgaagaatggcgtatctgttgacacttccatgggtttcacaccacttgaaggtcttgtcatgggcacgcgcagcggcgatattgatccggccatcgtggaatttcttgagaaagaagaaggattgtcggccaaagaagtcgtcaacatcctcaacaagaaatctggtgtgtatgggctcaccaaaggctttagtagtgacatgcgtgacattgaagataatgctattgaaggtgatcctgtatgccgccttgcattcgatgtgtacgaatatcgtatcgcgaaatatattggcgcatacgctgcggccatgaacggtgttgacgcgatcgtctttaccgcaggagttggcgaaaatagcccgattatgcgcgaagaaattattgagaactacttgggctacttagggatcaagatcgataaagaagccaatgatttcaaaggtgaggagaagatcatttcaacgcccgattccaaagtgattgcgatggtagttccgaccaacgaggagctcatgatcgccaaagacacgaaagaaatcattgagaaagggttggacgagcttaagatc

SEQ ID NO: 326 - protein, 417 aa, synthetic construct
  REGION 1..417: note = Variant of acetate kinase
MHHHHHHGGSGMKVLVINSGSSSIKYQLLDMTNEKVLAKGLVERIGIDGSRLVHKVNGEKHVLEHEIKNHEIGLKLVLDLLTDEKYGVLKDLKEIDAVGHRVVHGGERFASSVKITDEVLKTIETLSFLAPLHNPANIMGIKSSMKLMPGVPQVAVFDTAFHQKMPEKAYLYAIPYEYYEKYKIRRYGFHGTSHRYVSKRAAEIMGKPYDQLKIITVHVGNGASVAAVKNGVSVDTSMGFTPLEGLVMGTRSGDIDPAIVEFLEKEEGLSAKEVVNILNKKSGVYGLTKGFSSDMRDIEDNAIEGDPVCRLAFDVYEYRIAKYIGAYAAAMNGVDAIVFTAGVGENSPIMREEIIENYLGYLGIKIDKEANDFKGEEKIISTPDSKVIAMVVPTNEELMIAKDTKEIIEKGLDELKI

SEQ ID NO: 327 - DNA, 1251 bp, synthetic construct
  misc_feature 1..1251: note = Variant of acetate kinase
  source 1..1251: mol_type = other DNA
atgcaccatcatcatcatcatggcggtagcggcatgaaagttctggtgattaattctggtagctcctccatcaaatatcagctcctcgatatgaccaacgaaaaggtattagcgaaaggcttggtcgagcgcattggcatcgacggttcgcgtatcgtgcataaagttaacggcgaaaaacacgtgctggaacatgagattaagaatcacgaaattggacttaaattggtcctggatcttcttacggacgaaaaatacggtgtgttgaaggatctcaaagaaatcgatgcagttgggcatcgcgtagtacatggcggcgagcgttttgccagtagcgtgaagattactgacgaagtcttaaagaccatcgagacgttgtcgttcttagctccgttacacaatccagcgaacattatgggtatcaagagcagcatgaaattattaccgggtgtgcctcaagttgccgtctttgatacagcgttccaccagaagatgccggagaaagcctatttgtacgcaatcccctatgagtactacgagaaatataaaattcgccgctatgggtttcatggaacctcacatcgttatgtgagtaaacgtgctgcggaaattatgggcaaaccgtacgatcagctcaagatcattaccgttcacgtgggtaacggcgcatcagttgcggcggtgaagaatggcgtatctgttgacacttccatgggtttcacaccacttgaaggtcttgtcatgggcacgcgcagcggcgatattgatccggccatcgtggaatttcttgagaaagaagaaggattgtcggccaaagaagtcgtcaacatcctcaacaagaaatctggtgtgtatgggctcaccaaaggctttagtagtgacatgcgtgacattgaagataatgctattgaaggtgatcctgtatgccgccttgcattcgatgtgtacgaatatcgtatcgcgaaatatattggcgcatacgctgcggccatgaacggtgttgacgcgatcgtctttaccgcaggagttggcgaaaatagcccgattatgcgcgaagaaattattgagaactacttgggctacttagggatcaagatcgataaagaagccaatcgcttcaaaggtgaggagaagatcatttcaacgcccgattccaaagtgattgcgatggtaattccgaccaacgaggagctcatgatcgccaaagacacgaaagaaatcattgagaaagggttggacgagcttaagatc

SEQ ID NO: 328 - protein, 417 aa, synthetic construct
  REGION 1..417: note = Variant of acetate kinase
MHHHHHHGGSGMKVLVINSGSSSIKYQLLDMTNEKVLAKGLVERIGIDGSRIVHKVNGEKHVLEHEIKNHEIGLKLVLDLLTDEKYGVLKDLKEIDAVGHRVVHGGERFASSVKITDEVLKTIETLSFLAPLHNPANIMGIKSSMKLLPGVPQVAVFDTAFHQKMPEKAYLYAIPYEYYEKYKIRRYGFHGTSHRYVSKRAAEIMGKPYDQLKIITVHVGNGASVAAVKNGVSVDTSMGFTPLEGLVMGTRSGDIDPAIVEFLEKEEGLSAKEVVNILNKKSGVYGLTKGFSSDMRDIEDNAIEGDPVCRLAFDVYEYRIAKYIGAYAAAMNGVDAIVFTAGVGENSPIMREEIIENYLGYLGIKIDKEANRFKGEEKIISTPDSKVIAMVIPTNEELMIAKDTKEIIEKGLDELKI

SEQ ID NO: 329 - DNA, 1251 bp, synthetic construct
  misc_feature 1..1251: note = Variant of acetate kinase
  source 1..1251: mol_type = other DNA
atgcaccatcatcatcatcatggcggtagcggcatgaaagttctggtgattaattctggtagctcctccatcaaatatcagctcctcgatatgaccaacgaaaaggtattagcgaaaggcttggtcgagcgcattggcatcgacggttcgcgtcttgtgcataaagttaacggcgaaaaacacgtgctggaacatgagattaaggatcacgaaattggacttaaattggtcctggatcttcttacggacgaaaaatacggtgtgttgaaggatctcaaagaaatcgatgcagttgggcatcgcgtagtacatggcggcgagcgttttgccagtagcgtgaagattactgacgaagtcttaaagaccatcgagacgttgtcgttcttagctccgttacacaatccagcgaacattatgggtatcaagagcagcatgaaattattaccgggtgtgcctcaagttgccgtctttgatacagcgttccaccagaagatgccggagaaagcctatttgtacgcaatcccctatgagtactacgagaaatataaaattcgccgctatgggtttcatggaacctcacatcgttatgtgagtaaacgtgctgcggaaattatgggcaaaccgtacgatcagctcaagatcattaccgttcacgtgggtaacggcgcatcagttgcggcggtgaagaatggcgtatctgttgacacttccatgggtttcacaccacttgaaggtcttgtcatgggcacgcgcagcggcgatattgatccggccatcgtggaatttcttgagaaagaagaaggattgtcggccaaagaagtcgtcaacatcctcaacaagaaatctggtgtgtatgggctcaccaaaggctttagtagtgacatgcgtgacattgaagataatgctattgaaggtgatcctgtatgccgccttgcattcgatgtgtacgaatatcgtatcgcgaaatatattggcgcatacgctgcggccatgaacggtgttgacgcgatcgtctttaccgcaggagttggcgaaaatagcccgattatgcgcgaagaaattattgagaactacttgggctacttagggatcaagatcgataaagaagccaatcgcttcaaaggtgaggagaagatcatttcaacgcccgattccaaagtgattgcgatggtagttccgaccaacgaggagctcatgatcgccaaagacacgaaagaaatcattgagaaagggttggacgagcttaagatc

SEQ ID NO: 330 - protein, 417 aa, synthetic construct
  REGION 1..417: note = Variant of acetate kinase
MHHHHHHGGSGMKVLVINSGSSSIKYQLLDMTNEKVLAKGLVERIGIDGSRLVHKVNGEKHVLEHEIKDHEIGLKLVLDLLTDEKYGVLKDLKEIDAVGHRVVHGGERFASSVKITDEVLKTIETLSFLAPLHNPANIMGIKSSMKLLPGVPQVAVFDTAFHQKMPEKAYLYAIPYEYYEKYKIRRYGFHGTSHRYVSKRAAEIMGKPYDQLKIITVHVGNGASVAAVKNGVSVDTSMGFTPLEGLVMGTRSGDIDPAIVEFLEKEEGLSAKEVVNILNKKSGVYGLTKGFSSDMRDIEDNAIEGDPVCRLAFDVYEYRIAKYIGAYAAAMNGVDAIVFTAGVGENSPIMREEIIENYLGYLGIKIDKEANRFKGEEKIISTPDSKVIAMVVPTNEELMIAKDTKEIIEKGLDELKI

SEQ ID NO: 331 - DNA, 1251 bp, synthetic construct
  misc_feature 1..1251: note = Variant of acetate kinase
  source 1..1251: mol_type = other DNA
atgcaccatcatcatcatcatggcggtagcggcatgaaagttctggtgattaattctggtagctcctccatcaaatatcagctcctcgatatgaccaacgaaaaggtattagcgaaaggcttggtcgagcgcattggcatcgacggttcgcgtatcgtgcataaagttaacggcgaaaaacacgtgctggaacatgagattaagaatcacgaaattggacttaaattggtcctggatcttcttacggacgaaaaatacggtgtgttgaaggatctcaaagaaatcgatgcagttgggcatcgcgtagtacatggcggcgagcgttttgccagtagcgtgaagattactgacgaagtcttaaagaccatcgagacgttgtcgttcttagctccgttacacaatccagtgaacattatgggtatcaagagcagcatgaaattattaccgggtgtgcctcaagttgccgtctttgatacagcgttccaccagaagatgccggagaaagcctatttgtacgcaatcccctatgagtactacgagaaatataaaattcgccgctatgggtttcatggaacctcacatcgttatgtgagtaaacgtgctgcggaaattctgggcaaaccgtacgatcagctcaagatcattaccgttcacgtgggtaacggcgcatcagttgcggcggtgaagaatggcgtatctgttgacacttccatgggtttcacaccacttgaaggtcttgtcatgggcacgcgcagcggcgatattgatccggccatcgtggaatttcttgagaaagaagaaggattgtcggccaaagaagtcgtcaacatcctcaacaagaaatctggtgtgtatgggctcaccaaaggctttagtagtgacatgcgtgacattgaagataatgctattgaaggtgatcctgtatgccgccttgcattagatgtgtacgaatatcgtatcgcgaaatatattggcgcatacgctgcggccatgaacggtgttgacgcgatcgtctttaccgcaggagttggcgaaaatagcccgattatgcgcgaagaaattattgagaactacttgggctacttagggatcaagatcgataaagaagccaatgacttcaaaggtgaggagaagatcatttcaacgcccgattccaaagtgattgcgatggtagttccgaccaacgaggagctcatgatcgccaaagacacgaaagaaatcattgagaaagggttggacgagcttaagatc

SEQ ID NO: 332 - protein, 417 aa, synthetic construct
  REGION 1..417: note = Variant of acetate kinase
MHHHHHHGGSGMKVLVINSGSSSIKYQLLDMTNEKVLAKGLVERIGIDGSRIVHKVNGEKHVLEHEIKNHEIGLKLVLDLLTDEKYGVLKDLKEIDAVGHRVVHGGERFASSVKITDEVLKTIETLSFLAPLHNPVNIMGIKSSMKLLPGVPQVAVFDTAFHQKMPEKAYLYAIPYEYYEKYKIRRYGFHGTSHRYVSKRAAEILGKPYDQLKIITVHVGNGASVAAVKNGVSVDTSMGFTPLEGLVMGTRSGDIDPAIVEFLEKEEGLSAKEVVNILNKKSGVYGLTKGFSSDMRDIEDNAIEGDPVCRLALDVYEYRIAKYIGAYAAAMNGVDAIVFTAGVGENSPIMREEIIENYLGYLGIKIDKEANDFKGEEKIISTPDSKVIAMVVPTNEELMIAKDTKEIIEKGLDELKI

SEQ ID NO: 333 - DNA, 1251 bp, synthetic construct
  misc_feature 1..1251: note = Variant of acetate kinase
  source 1..1251: mol_type = other DNA
atgcaccatcatcatcatcatggcggtagcggcatgaaagttctggtgattaattctggtagctcctccatcaaatatcagctcctcgatatgaccaacgaaaaggtattagcgaaaggcttggtcgagcgcattggcatcgacggttcgcgtatcgtgcataaagttaacggcgaaaaacacgtgctggaacatgagattaagaatcacgaaattggacttaaattggtcctggatcttcttacggacgaaaaatacggtgtgttgaaggatctcaaagaaatcgatgcagttgggcatcgcgtagtacatggcggcgagcgttttgccagtagcgtgaagattactgacgaagtcttaaagaccatcgagacgttgtcgttcttagctccgttacacaatccagcgaacattatgggtatcaagagcagcatgaaattattaccgggtgtgcctcaagttgccgtctttgatacagcgttccaccagaagatgccggagaaagcctatttgtacgcaatcccctatgagtactacgagaaatataaaattcgccgctatgggtttcatggaacctcacatcgttatgtgagtaaacgtgctgcggaaattctgggcaaacagtacgatcagctcaagatcattaccgttcacgtgggtaacggcgcatcagttgcggcggtgaagaatggcgtatctgttgacacttccatgggtttcacaccacttgaaggtcttgtcatgggcacgcgcagcggcgatattgatccggccatcgtggaatttcttgagaaagaagaaggattgtcggccaaagaagtcgtcaacatcctcaacaagaaatctggtgtgtatgggctcaccaaaggctttagtagtgacatgcgtgacattgaagataatgctattgaaggtgatcctgtatgccgccttgcattagatgtgtacgaatatcgtatcgcgaaatatattggcgcatacgctgcggccatgaacggtgttgacgcgatcgtctttaccgcaggagttggcgaaaatagcccgattatgcgcgaagaaattattgagaactacttgggctacttagggatcaagatcgataaagaagccaatgactttaaaggtgaggagaagatcatttcaacgcccgattccaaagtgattgcgatggtagttccgaccaacgaggagctcatgatcgccaaagacacgaaagaaatcattgagaaagggttggacgagcttaagatc

SEQ ID NO: 334 - protein, 417 aa, synthetic construct
  REGION 1..417: note = Variant of acetate kinase
MHHHHHHGGSGMKVLVINSGSSSIKYQLLDMTNEKVLAKGLVERIGIDGSRIVHKVNGEKHVLEHEIKNHEIGLKLVLDLLTDEKYGVLKDLKEIDAVGHRVVHGGERFASSVKITDEVLKTIETLSFLAPLHNPANIMGIKSSMKLLPGVPQVAVFDTAFHQKMPEKAYLYAIPYEYYEKYKIRRYGFHGTSHRYVSKRAAEILGKQYDQLKIITVHVGNGASVAAVKNGVSVDTSMGFTPLEGLVMGTRSGDIDPAIVEFLEKEEGLSAKEVVNILNKKSGVYGLTKGFSSDMRDIEDNAIEGDPVCRLALDVYEYRIAKYIGAYAAAMNGVDAIVFTAGVGENSPIMREEIIENYLGYLGIKIDKEANDFKGEEKIISTPDSKVIAMVVPTNEELMIAKDTKEIIEKGLDELKI

SEQ ID NO: 335 - DNA, 1251 bp, synthetic construct
  misc_feature 1..1251: note = Variant of acetate kinase
  source 1..1251: mol_type = other DNA
atgcaccatcatcatcatcatggcggtagcggcatgaaagttctggtgattaattctggtagctcctccatcaaatatcagctcctcgatatgaccaacgaaaaggtattagcgaaaggcttggtcgagcgcattggcatcgacggttcgcgtatcgtgcataaagttaacggcgaaaaacacgtgctggaacatgagattaaaaatcacgaaattggacttaaattggtcctggatcttcttacggacgaaaaatacggtgtgttgaaggatctcaaagaaatcgatgcagttgggcatcgcgtagtacatggcggcgagcgttttgccagtagcgtgaagattactgacgaagtcttaaagaccatcgagacgttgtcgttcttagctccgttacacaatccagtgaacattatgggtatcaagagcagcatgaaactgttaccgggtgtgcctcaagttgccgtctttgatacagcgttccaccagaagatgccggagaaagcctatttgtacgcaatcccctatgagtactacgagaaatataaaattcgccgctatgggtttcatggaacctcacatcgttatgtgagtaaacgtgctgcggaaattatgggcaaaccgtacgatcagctcaagatcattaccgttcacgtgggtaacggcgcatcagttgcggcggtgaagaatggcgtatctgttgacacttccatgggtttcacaccacttgaaggtcttgtcatgggcacgcgcagcggcgatattgatccggccatcgtggaatttcttgagaaagaagaaggattgtcggccaaagaagtcgtcaacatcctcaacaagaaatctggtgtgtatgggctcaccaaaggctttagtagtgacatgcgtgacattgaagataatgctattgaaggtgatcctgtatgccgccttgcattcgatgtgtacgaatatcgtatcgcgaaatatattggcgcatacgctgcggccatgaacggtgttgacgcgatcgtctttaccgcaggagttggcgaaaatagcccgattatgcgccatgaaattattgagaactacttgggctacttagggatcaagatcgataaagaagccaatgacttcaaaggtgaggagaagatcatttcaacgcccgattccaaagtgattgcgatggtagttccgaccaacgaggagctcatgatcgccaaagacacgaaagaaatcgttgagaaagggttggacgagcttaagatc

SEQ ID NO: 336 - protein, 417 aa, synthetic construct
  REGION 1..417: note = Variant of acetate kinase
MHHHHHHGGSGMKVLVINSGSSSIKYQLLDMTNEKVLAKGLVERIGIDGSRIVHKVNGEKHVLEHEIKNHEIGLKLVLDLLTDEKYGVLKDLKEIDAVGHRVVHGGERFASSVKITDEVLKTIETLSFLAPLHNPVNIMGIKSSMKLLPGVPQVAVFDTAFHQKMPEKAYLYAIPYEYYEKYKIRRYGFHGTSHRYVSKRAAEIMGKPYDQLKIITVHVGNGASVAAVKNGVSVDTSMGFTPLEGLVMGTRSGDIDPAIVEFLEKEEGLSAKEVVNILNKKSGVYGLTKGFSSDMRDIEDNAIEGDPVCRLAFDVYEYRIAKYIGAYAAAMNGVDAIVFTAGVGENSPIMRHEIIENYLGYLGIKIDKEANDFKGEEKIISTPDSKVIAMVVPTNEELMIAKDTKEIVEKGLDELKI

SEQ ID NO: 337 - DNA, 1251 bp, synthetic construct
  misc_feature 1..1251: note = Variant of acetate kinase
  source 1..1251: mol_type = other DNA
atgcaccatcatcatcatcatggcggtagcggcatgaaagttctggtgattaattctggtagctcctccatcaaatatcagctcctcgatatgaccaacgaaaaggtattagcgaaaggcttggtcgagcgcattggcatcgacggttcgcgtatcgtgcataaagttaacggcgaaaaacacgtgctggaacatgagattaagaatcacgaaattggacttaaattggtcctggatcttcttacggacgaaaaatacggtgtgttgaaggatctcaaagaaatcgatgcagttgggcatcgcgtagtacatggcggcgagcgttttgccagtagcgtgaagattactgacgaagtcttaaagaccatcgagacgttgtcgttcttagctccgttacacaatccagcgaacattatgggtatcaagagcagcatgaaattattaccgggtgtgcctcaagttgccgtctttgatacagcgttccaccagaagatgccggagaaagcctatttgtacgcaatcccctatgagtactacgagaaatataaaattcgccgctatgggtttcatggaacctcacatcgttatgtgagtaaacgtgctgcggaaattctgggcaaaccgtacgatcagctcaagatcattaccgttcacgtgggtaacggcgcatcagttgcggcggtgaagaatggcgtatctgttgacacttccatgggtttcacaccacttgaaggtcttgtcatgggcacgcgcagcggcgatattgatccggccatcgtggaatttcttgagaaagaagaaggattgtcggccaaagaagtcgtcaacatcctcaacaagaaatctggtgtgtatgggctcaccaaaggctttagtagtgacatgcgtgacattgaagataatgctattgaaggtgatcctgtatgccgccttgcattagatgtgtacgaatatcgtatcgcgaaatatattggcgcatacgctgcggccatgaacggtgttgacgcgatcgtctttaccgcaggagttggcgaaaatagcccgattatgcgcgaagaaattattgagaactacttgggctacttagggatcaagatcgataaagaagccaatgacttcaaaggtgaggagaagatcatttcaacgcccgattccaaagtgattgcgatggtagttccgaccaacgaggagctcatgatcgccaaagacacgaaagaaatcattgagaaagggttggacgagcttaagatc

SEQ ID NO: 338 - protein, 417 aa, synthetic construct
  REGION 1..417: note = Variant of acetate kinase
MHHHHHHGGSGMKVLVINSGSSSIKYQLLDMTNEKVLAKGLVERIGIDGSRIVHKVNGEKHVLEHEIKNHEIGLKLVLDLLTDEKYGVLKDLKEIDAVGHRVVHGGERFASSVKITDEVLKTIETLSFLAPLHNPANIMGIKSSMKLLPGVPQVAVFDTAFHQKMPEKAYLYAIPYEYYEKYKIRRYGFHGTSHRYVSKRAAEILGKPYDQLKIITVHVGNGASVAAVKNGVSVDTSMGFTPLEGLVMGTRSGDIDPAIVEFLEKEEGLSAKEVVNILNKKSGVYGLTKGFSSDMRDIEDNAIEGDPVCRLALDVYEYRIAKYIGAYAAAMNGVDAIVFTAGVGENSPIMREEIIENYLGYLGIKIDKEANDFKGEEKIISTPDSKVIAMVVPTNEELMIAKDTKEIIEKGLDELKI

SEQ ID NO: 339 - DNA, 1251 bp, synthetic construct
  misc_feature 1..1251: note = Variant of acetate kinase
  source 1..1251: mol_type = other DNA
atgcaccatcatcatcatcatggcggtagcggcatgaaagttctggtgattaattctggtagctcctccatcaaatatcagctcctcgatatgaccaacgaaaaggtattagcgaaaggcttggtcgagcgcattggcatcgacggttcgcgtcttgtgcataaagttaacggcgaaaaacacgtgctggaacatgagattaagaatcacgaaattggacttaaattggtcctggatcttcttacggacgaaaaatacggtgtgttgaaggatctcaaagaaatcgatgcagttgggcatcgcgtagtacatggcggcgagcgttttgccagtagcgtgaagattactgacgaagtcttaaagaccatcgagacgttgtcgttcttagctccgttacacaatccactgaacattatgggtatcaagagcagcatgaaattactgccgggtgtgcctcaagttgccgtctttgatacagcgttccaccagaagatgccggagaaagcctatttgtacgcaatcccctatgagtactacgagaaatataaaattcgccgctatgggtttcatggaacctcacatcgttatgtgagtaaacgtgctgcggaaattatgggcaaaccgtacgatcagctcaagatcattaccgttcacgtgggtaacggcgcatcagttgcggcggtgaagaatggcgtatctgttgacacttccatgggtttcacaccacttgaaggtcttgtcatgggcacgcgcagcggcgatattgatccggccatcgtggaatttcttgagaaagaagaaggattgtcggccaaagaagtcgtcaacatcctcaacaagaaatctggtgtgtatgggctcaccaaaggctttagtagtgacatgcgtgacattgaagataatgctattgaaggtgatcctgtatgccgccttgcattcgatgtgtacgaatatcgtatcgcgaaatatattggcgcatacgctgcggccatgaacggtgttgacgcgatcgtctttaccgcaggagttggcgaaaatagcccgattatgcgcgaagaaattattgagaactacttgggctacttagggatcaagatcgataaagaagccaatgatttcaaaggtgaggagaagatcatttcaacgcccgattccaaagtgattgcgatggtagttccgaccaacgaggagctcatgatcgccaaagacacgaaagaaatcattgagaaagggttggacgagcttaagatc

SEQ ID NO: 340 - protein, 417 aa, synthetic construct
  REGION 1..417: note = Variant of acetate kinase
MHHHHHHGGSGMKVLVINSGSSSIKYQLLDMTNEKVLAKGLVERIGIDGSRLVHKVNGEKHVLEHEIKNHEIGLKLVLDLLTDEKYGVLKDLKEIDAVGHRVVHGGERFASSVKITDEVLKTIETLSFLAPLHNPLNIMGIKSSMKLLPGVPQVAVFDTAFHQKMPEKAYLYAIPYEYYEKYKIRRYGFHGTSHRYVSKRAAEIMGKPYDQLKIITVHVGNGASVAAVKNGVSVDTSMGFTPLEGLVMGTRSGDIDPAIVEFLEKEEGLSAKEVVNILNKKSGVYGLTKGFSSDMRDIEDNAIEGDPVCRLAFDVYEYRIAKYIGAYAAAMNGVDAIVFTAGVGENSPIMREEIIENYLGYLGIKIDKEANDFKGEEKIISTPDSKVIAMVVPTNEELMIAKDTKEIIEKGLDELKI

SEQ ID NO: 341 - DNA, 1251 bp, synthetic construct
  misc_feature 1..1251: note = Variant of acetate kinase
  source 1..1251: mol_type = other DNA
atgcaccatcatcatcatcatggcggtagcggcatgaaagttctggtgattaattctggtagctcctccatcaaatatcagctcctcgatatgaccaacgaaaaggtattagcgaaaggcttggtcgagcgcattggcatcgacggttcgcgtatcgtgcataaagttaacggcgaaaaacacgtgctggaacatgagattaaaaatcacgaaattggacttaaattggtcctggatcttcttacggacgaaaaatacggtgtgttgaaggatctcaaagaaatcgatgcagttgggcatcgcgtagtacatggcggcgagcgttttgccagtagcgtgaagattactgacgaagtcttaaagaccatcgagacgttgtcgttcttagctccgttacacaatccagcgaacattatgggtatcaagagcagcatgaaattattaccgggtgtgcctcaagttgccgtctttgatacagcgttccaccagaagatgccggagaaagcctatttgtacgcaatcccctatgagtactacgagaaatataaaattcgccgctatgggtttcatggaacctcacatcgttatgtgagtaaacgtgctgcggaaattatgggcaaaccgtacgatcagctcaagatcattaccgttcacgtgggtaacggcgcatcagttgcggcggtgaagaatggcgtatctgttgacacttccatgggtttcacaccacttgaaggtcttgtcatgggcacgcgcagcggcgatattgatccggccatcgtggaatttcttgagaaagaagaaggattgtcggccaaagaagtcgtcaacatcctcaacaagaaatctggtgtgtatgggctcaccaaaggctttagtagtgacatgcgtgacattgaagataatgctattgaaggtgatcctgtatgccgccttgcattagatgtgtacgaatatcgtatcgcgaaatatattggcgcatacgctgcggccatgaacggtgttgacgcgatcgtctttaccgcaggagttggcgaaaatagcccgattatgcgccatgaaattattgagaactacttgggctacttagggatcaagatcgataaagaagccaatgactttaaaggtgaggagaagatcatttcaacgcccgattccaaagtgattgcgatggtagttccgaccaacgaggagctcatgatcgccaaagacacgaaagaaatcattgagaaagggttggacgagcttaagatc

SEQ ID NO: 342 - protein, 417 aa, synthetic construct
  REGION 1..417: note = Variant of acetate kinase
MHHHHHHGGSGMKVLVINSGSSSIKYQLLDMTNEKVLAKGLVERIGIDGSRIVHKVNGEKHVLEHEIKNHEIGLKLVLDLLTDEKYGVLKDLKEIDAVGHRVVHGGERFASSVKITDEVLKTIETLSFLAPLHNPANIMGIKSSMKLLPGVPQVAVFDTAFHQKMPEKAYLYAIPYEYYEKYKIRRYGFHGTSHRYVSKRAAEIMGKPYDQLKIITVHVGNGASVAAVKNGVSVDTSMGFTPLEGLVMGTRSGDIDPAIVEFLEKEEGLSAKEVVNILNKKSGVYGLTKGFSSDMRDIEDNAIEGDPVCRLALDVYEYRIAKYIGAYAAAMNGVDAIVFTAGVGENSPIMRHEIIENYLGYLGIKIDKEANDFKGEEKIISTPDSKVIAMVVPTNEELMIAKDTKEIIEKGLDELKI

SEQ ID NO: 343 - DNA, 1251 bp, synthetic construct
  misc_feature 1..1251: note = Variant of acetate kinase
  source 1..1251: mol_type = other DNA
atgcaccatcatcatcatcatggcggtagcggcatgaaagttctggtgattaattctggtagctcctccatcaaatatcagctcctcgatatgaccaacgaaaaggtattagcgaaaggcttggtcgagcgcattggcatcgacggttcgcgtattgtgcataaagttaacggcgaaaaacacgtgctggaacatgagattaagaatcacgaaattggacttaaattggtcctggatcttcttacggacgaaaaatacggtgtgttgaaggatctcaaagaaatcgatgcagttgggcatcgcgtagtacatggcggcgagcgttttgccagtagcgtgaagattactgacgaagtcttaaagaccatcgagacgttgtcgttcttagctccgttacacaatccactgaacattatgggtatcaagagcagcatgaaattaatgccgggtgtgcctcaagttgccgtctttgatacagcgttccaccagaagatgccggagaaagcctatttgtacgcaatcccctatgagtactacgagaaatataaaattcgccgctatgggtttcatggaacctcacatcgttatgtgagtaaacgtgctgcggaaattatgggcaaaccgtacgatcagctcaagatcattaccgttcacgtgggtaacggcgcatcagttgcggcggtgaagaatggcgtatctgttgacacttccatgggtttcacaccacttgaaggtcttgtcatgggcacgcgcagcggcgatattgatccggccatcgtggaatttcttgagaaagaagaaggattgtcggccaaagaagtcgtcaacatcctcaacaagaaatctggtgtgtatgggctcaccaaaggctttagtagtgacatgcgtgacattgaagataatgctattgaaggtgatcctgtatgccgccttgcattcgatgtgtacgaatatcgtatcgcgaaatatattggcgcatacgctgcggccatgaacggtgttgacgcgatcgtctttaccgcaggagttggcgaaaatagccgcattatgcgcgaagaaattattgagaactacttgggctacttagggatcaagatcgataaagaagccaatgatttcaaaggtgaggagaagatcatttcaacgcccgattccaaagtgattgcgatggtagttccgaccaacgaggagctcatgatcgccaaagacacgaaagaaatcattgagaaagggttggacgagcttaagatc

SEQ ID NO: 344 - protein, 417 aa, synthetic construct
  REGION 1..417: note = Variant of acetate kinase
MHHHHHHGGSGMKVLVINSGSSSIKYQLLDMTNEKVLAKGLVERIGIDGSRIVHKVNGEKHVLEHEIKNHEIGLKLVLDLLTDEKYGVLKDLKEIDAVGHRVVHGGERFASSVKITDEVLKTIETLSFLAPLHNPLNIMGIKSSMKLMPGVPQVAVFDTAFHQKMPEKAYLYAIPYEYYEKYKIRRYGFHGTSHRYVSKRAAEIMGKPYDQLKIITVHVGNGASVAAVKNGVSVDTSMGFTPLEGLVMGTRSGDIDPAIVEFLEKEEGLSAKEVVNILNKKSGVYGLTKGFSSDMRDIEDNAIEGDPVCRLAFDVYEYRIAKYIGAYAAAMNGVDAIVFTAGVGENSRIMREEIIENYLGYLGIKIDKEANDFKGEEKIISTPDSKVIAMVVPTNEELMIAKDTKEIIEKGLDELKI

SEQ ID NO: 345 - DNA, 1251 bp, synthetic construct
  misc_feature 1..1251: note = Variant of acetate kinase
  source 1..1251: mol_type = other DNA
atgcaccatcatcatcatcatggcggtagcggcatgaaagttctggtgattaattctggtagctcctccatcaaatatcagctcctcgatatgaccaacgaaaaggtattagcgaaaggcttggtcgagcgcattggcatcgacggttcgcgtatcgtgcataaagttaacggcgaaaaacacgtgctggaacatgagattaagaatcacgaaattggacttaaattggtcctggatcttcttacggacgaaaaatacggtgtgttgaaggatctcaaagaaatcgatgcagttgggcatcgcgtagtacatggcggcgagcgttttgccagtagcgtgaagattactgacgaagtcttaaagaccatcgagacgttgtcgttcttagctccgttacacaatccagtgaacattatgggtatcaagagcagcatgaaattattaccgggtgtgcctcaagttgccgtctttgatacagcgttccaccagaagatgccggagaaagcctatttgtacgcaatcccctatgagtactacgagaaatataaaattcgccgctatgggtttcatggaacctcacatcgttatgtgagtaaacgtgctgcggaaattatgggcaaaccgtacgatcagctcaagatcattaccgttcacgtgggtaacggcgcatcagttgcggcggtgaagaatggcgtatctgttgacacttccatgggtttcacaccacttgaaggtcttgtcatgggcacgcgcagcggcgatattgatccggccatcgtggaatttcttgagaaagaagaaggattgtcggccaaagaagtcgtcaacatcctcaacaagaaatctggtgtgtatgggctcaccaaaggctttagtagtgacatgcgtgacattgaagataatgctattgaaggtgatcctgtatgccgccttgcatttgatgtgtacgaatatcgtatcgcgaaatatattggcgcatacgctgcggccatgaacggtgttgacgcgatcgtctttaccgcaggagttggcgaaaatagcccgattatgcgcgaagaaattattgagaactacttgggctacttagggatcaagatcgataaagaagccaatgacttcaaaggtgaggagaagatcatttcaacgcccgattccaaagtgattgcgatggtagttccgaccaacgaggagctcatgatcgccaaagacacgaaagaaatcgttgagaaagggttggacgagcttaagatc

SEQ ID NO: 346 - protein, 417 aa, synthetic construct
  REGION 1..417: note = Variant of acetate kinase
MHHHHHHGGSGMKVLVINSGSSSIKYQLLDMTNEKVLAKGLVERIGIDGSRIVHKVNGEKHVLEHEIKNHEIGLKLVLDLLTDEKYGVLKDLKEIDAVGHRVVHGGERFASSVKITDEVLKTIETLSFLAPLHNPVNIMGIKSSMKLLPGVPQVAVFDTAFHQKMPEKAYLYAIPYEYYEKYKIRRYGFHGTSHRYVSKRAAEIMGKPYDQLKIITVHVGNGASVAAVKNGVSVDTSMGFTPLEGLVMGTRSGDIDPAIVEFLEKEEGLSAKEVVNILNKKSGVYGLTKGFSSDMRDIEDNAIEGDPVCRLAFDVYEYRIAKYIGAYAAAMNGVDAIVFTAGVGENSPIMREEIIENYLGYLGIKIDKEANDFKGEEKIISTPDSKVIAMVVPTNEELMIAKDTKEIVEKGLDELKI

SEQ ID NO: 347 - DNA, 1251 bp, synthetic construct
  misc_feature 1..1251: note = Variant of acetate kinase
  source 1..1251: mol_type = other DNA
atgcaccatcatcatcatcatggcggtagcggcatgaaagttctggtgattaattctggtagctcctccatcaaatatcagctcctcgatatgaccaacgaaaaggtattagcgaaaggcttggtcgagcgcattggcatcgacggttcgcgtattgtgcataaagttaacggcgaaaaacacgtgctggaacatgagattaagaatcacgaaattggacttaaattggtcctggatcttcttacggacgaaaaatacggtgtgttgaaggatctcaaagaaatcgatgcagttgggcatcgcgtagtacatggcggcgagcgttttgccagtagcgtgaagattactgacgaagtcttaaagaccatcgagacgttgtcgttcttagctccgttacacaatccactgaacattatgggtatcaagagcagcatgaaattattaccgggtgtgcctcaagttgccgtctttgatacagcgttccaccagaagatgccggagaaagcctatttgtacgcaatcccctatgagtactacgagaaatataaaattcgccgctatgggtttcatggaacctcacatcgttatgtgagtaaacgtgctgcggaaattatgggcaaaccgtacgatcagctcaagatcattaccgttcacgtgggtaacggcgcatcagttgcggcggtgaagaatggcgtatctgttgacacttccatgggtttcacaccacttgaaggtcttgtcatgggcacgcgcagcggcgatattgatccggccatcgtggaatttcttgagaaagaagaaggattgtcggccaaagaagtcgtcaacatcctcaacaagaaatctggtgtgtatgggctcaccaaaggctttagtagtgacatgcgtgacattgaagataatgctattgaaggtgatcctgtatgccgccttgcattcgatgtgtacgaatatcgtatcgcgaaatatattggcgcatacgctgcggccatgaacggtgttgacgcgatcgtctttaccgcaggagttggcgaaaatagcccgattatgcgcgaagaaattattgagaactacttgggctacttagggatcaagatcgataaagaagccaatgacttcaaaggtgaggagaagatcatttcaacgcccgattccaaagtgattgcgatggtaattccgaccaacgaggagctcatgatcgccaaagacacgaaagaaatcattgagaaagggttggacgagcttaagatc

SEQ ID NO: 348 - protein, 417 aa, synthetic construct
  REGION 1..417: note = Variant of acetate kinase
MHHHHHHGGSGMKVLVINSGSSSIKYQLLDMTNEKVLAKGLVERIGIDGSRIVHKVNGEKHVLEHEIKNHEIGLKLVLDLLTDEKYGVLKDLKEIDAVGHRVVHGGERFASSVKITDEVLKTIETLSFLAPLHNPLNIMGIKSSMKLLPGVPQVAVFDTAFHQKMPEKAYLYAIPYEYYEKYKIRRYGFHGTSHRYVSKRAAEIMGKPYDQLKIITVHVGNGASVAAVKNGVSVDTSMGFTPLEGLVMGTRSGDIDPAIVEFLEKEEGLSAKEVVNILNKKSGVYGLTKGFSSDMRDIEDNAIEGDPVCRLAFDVYEYRIAKYIGAYAAAMNGVDAIVFTAGVGENSPIMREEIIENYLGYLGIKIDKEANDFKGEEKIISTPDSKVIAMVIPTNEELMIAKDTKEIIEKGLDELKI

SEQ ID NO: 349 - DNA, 1251 bp, synthetic construct
  misc_feature 1..1251: note = Variant of acetate kinase
  source 1..1251: mol_type = other DNA
atgcaccatcatcatcatcatggcggtagcggcatgaaagttctggtgattaattctggtagctcctccatcaaatatcagctcctcgatatgaccaacgaaaaggtattagcgaaaggcttggtcgagcgcattggcatcgacggttcgcgtatcgtgcataaagttaacggcgaaaaacacgtgctggaacatgagattccgaatcacgaaattggacttaaattggtcctggatcttcttacggacgaaaaatacggtgtgttgaaggatctcaaagaaatcgatgcagttgggcatcgcgtagtacatggcggcgagcgttttgccagtagcgtgaagattactgacgaagtcttaaagaccatcgagacgttgtcgttcttagctccgttacacaatccagtgaacattatgggtatcaagagcagcatgaaattattaccgggtgtgcctcaagttgccgtctttgatacagcgttccaccagaagatgccggagaaagcctatttgtacgcaatcccctatgagtactacgagaaatataaaattcgccgctatgggtttcatggaacctcacatcgttatgtgagtaaacgtgctgcggaaattatgggcaaaccgtacgatcagctcaagatcattaccgttcacgtgggtaacggcgcatcagttgcggcggtgaagaatggcgtatctgttgacacttccatgggtttcacaccacttgaaggtcttgtcatgggcacgcgcagcggcgatattgatccggccatcgtggaatttcttgagaaagaagaaggattgtcggccaaagaagtcgtcaacatcctcaacaagaaatctggtgtgtatgggctcaccaaaggctttagtagtgacatgcgtgacattgaagataatgctattgaaggtgatcctgtatgccgccttgcatttgatgtgtacgaatatcgtatcgcgaaatatattggcgcatacgctgcggccatgaacggtgttgacgcgatcgtctttaccgcaggagttggcgaaaatagcccgattatgcgcgaagaaattattgagaactacttgggctacttagggatcaagatcgataaagaagccaatgacttcaaaggtgaggagaagatcatttcaacgcccgattccaaagtgattgcgatggtagttccgaccaacgaggagctcatgatcgccaaagacacgaaagaaatcattgagaaagggttggacgagcttaagatc

SEQ ID NO: 350 - protein, 417 aa, synthetic construct
  REGION 1..417: note = Variant of acetate kinase
MHHHHHHGGSGMKVLVINSGSSSIKYQLLDMTNEKVLAKGLVERIGIDGSRIVHKVNGEKHVLEHEIPNHEIGLKLVLDLLTDEKYGVLKDLKEIDAVGHRVVHGGERFASSVKITDEVLKTIETLSFLAPLHNPVNIMGIKSSMKLLPGVPQVAVFDTAFHQKMPEKAYLYAIPYEYYEKYKIRRYGFHGTSHRYVSKRAAEIMGKPYDQLKIITVHVGNGASVAAVKNGVSVDTSMGFTPLEGLVMGTRSGDIDPAIVEFLEKEEGLSAKEVVNILNKKSGVYGLTKGFSSDMRDIEDNAIEGDPVCRLAFDVYEYRIAKYIGAYAAAMNGVDAIVFTAGVGENSPIMREEIIENYLGYLGIKIDKEANDFKGEEKIISTPDSKVIAMVVPTNEELMIAKDTKEIIEKGLDELKI

SEQ ID NO: 351 - DNA, 1251 bp, synthetic construct
  misc_feature 1..1251: note = Variant of acetate kinase
  source 1..1251: mol_type = other DNA
atgcaccatcatcatcatcatggcggtagcggcatgaaagttctggtgattaattctggtagctcctccatcaaatatcagctcctcgatatgaccaacgaaaaggtattagcgaaaggcttggtcgagcgcattggcatcgacggttcgcgtatcgtgcataaagttaacggcgaaaaacacgtgctggaacatgagattaagaatcacgaaattggacttaaattggtcctggatcttcttacggacgaaaaatacggtgtgttgaaggatctcaaagaaatcgatgcagttgggcatcgcgtagtacatggcggcgagcgttttgccagtagcgtgaagattactgacgaagtcttaaagaccatcgagacgttgtcgttcttagctccgttacacaatccagtgaacattatgggtatcaagagcagcatgaaattattaccgggtgtgcctcaagttgccgtctttgatacagcgttccaccagaagatgccggagaaagcctatttgtacgcaatcccctatgagtactacgagaaatataaaattcgccgctatgggtttcatggaacctcacatcgttatgtgagtaaacgtgctgcggaaattctgggcaaaccgtacgatcagctcaagatcattaccgttcacgtgggtaacggcgcatcagttgcggcggtgaagaatggcgtatctgttgacacttccatgggtttcacaccacttgaaggtcttgtcatgggcacgcgcagcggcgatattgatccggccatcgtggaatttcttgagaaagaagaaggattgtcggccaaagaagtcgtcaacatcctcaacaagaaatctggtgtgtatgggctcaccaaaggctttagtagtgacatgcgtgacattgaagataatgctattgaaggtgatcctgtatgccgccttgcatttgatgtgtacgaatatcgtatcgcgaaatatattggcgcatacgctgcggccatgaacggtgttgacgcgatcgtctttaccgcaggagttggcgaaaatagcccgattatgcgcgaagaaattattgagaactacttgggctacttagggatcaagatcgataaagaagccaatgacttcaaaggtgaggagaagatcatttcaacgcccgattccaaagtgattgcgatggtagttccgaccaacgaggagctcatgatcgccaaagacacgaaagaaatcattgagaaagggttggacgagcttaagatc

SEQ ID NO: 352 - protein, 417 aa, synthetic construct
  REGION 1..417: note = Variant of acetate kinase
MHHHHHHGGSGMKVLVINSGSSSIKYQLLDMTNEKVLAKGLVERIGIDGSRIVHKVNGEKHVLEHEIKNHEIGLKLVLDLLTDEKYGVLKDLKEIDAVGHRVVHGGERFASSVKITDEVLKTIETLSFLAPLHNPVNIMGIKSSMKLLPGVPQVAVFDTAFHQKMPEKAYLYAIPYEYYEKYKIRRYGFHGTSHRYVSKRAAEILGKPYDQLKIITVHVGNGASVAAVKNGVSVDTSMGFTPLEGLVMGTRSGDIDPAIVEFLEKEEGLSAKEVVNILNKKSGVYGLTKGFSSDMRDIEDNAIEGDPVCRLAFDVYEYRIAKYIGAYAAAMNGVDAIVFTAGVGENSPIMREEIIENYLGYLGIKIDKEANDFKGEEKIISTPDSKVIAMVVPTNEELMIAKDTKEIIEKGLDELKI

SEQ ID NO: 353 - DNA, 1251 bp, synthetic construct
  misc_feature 1..1251: note = Variant of acetate kinase
  source 1..1251: mol_type = other DNA
atgcaccatcatcatcatcatggcggtagcggcatgaaagttctggtgattaattctggtagctcctccatcaaatatcagctcctcgatatgaccaacgaaaaggtattagcgaaaggcttggtcgagcgcattggcatcgacggttcgcgtattgtgcataaagttaacggcgaaaaacacgtgctggaacatgagattaaggatcacgaaattggacttaaattggtcctggatcttcttacggacgaaaaatacggtgtgttgaaggatctcaaagaaatcgatgcagttgggcatcgcgtagtacatggcggcgagcgttttgccagtagcgtgaagattactgacgaagtcttaaagaccatcgagacgttgtcgttcttagctccgttacacaatccactgaacattatgggtatcaagagcagcatgaaattactgccgggtgtgcctcaagttgccgtctttgatacagcgttccaccagaagatgccggagaaagcctatttgtacgcaatcccctatgagtactacgagaaatataaaattcgccgctatgggtttcatggaacctcacatcgttatgtgagtaaacgtgctgcggaaattatgggcaaaccgtacgatcagctcaagatcattaccgttcacgtgggtaacggcgcatcagttgcggcggtgaagaatggcgtatctgttgacacttccatgggtttcacaccacttgaaggtcttgtcatgggcacgcgcagcggcgatattgatccggccatcgtggaatttcttgagaaagaagaaggattgtcggccaaagaagtcgtcaacatcctcaacaagaaatctggtgtgtatgggctcaccaaaggctttagtagtgacatgcgtgacattgaagataatgctattgaaggtgatcctgtatgccgccttgcattcgatgtgtacgaatatcgtatcgcgaaatatattggcgcatacgctgcggccatgaacggtgttgacgcgatcgtctttaccgcaggagttggcgaaaatagcccgattatgcgcgaagaaattattgagaactacttgggctacttagggatcaagatcgataaagaagccaatgacttcaaaggtgaggagaagatcatttcaacgcccgattccaaagtgattgcgatggtagttccgaccaacgaggagctcatgatcgccaaagacacgaaagaaatcattgagaaagggttggacgagcttaagatc

SEQ ID NO: 354 - protein, 417 aa, synthetic construct
  REGION 1..417: note = Variant of acetate kinase
MHHHHHHGGSGMKVLVINSGSSSIKYQLLDMTNEKVLAKGLVERIGIDGSRIVHKVNGEKHVLEHEIKDHEIGLKLVLDLLTDEKYGVLKDLKEIDAVGHRVVHGGERFASSVKITDEVLKTIETLSFLAPLHNPLNIMGIKSSMKLLPGVPQVAVFDTAFHQKMPEKAYLYAIPYEYYEKYKIRRYGFHGTSHRYVSKRAAEIMGKPYDQLKIITVHVGNGASVAAVKNGVSVDTSMGFTPLEGLVMGTRSGDIDPAIVEFLEKEEGLSAKEVVNILNKKSGVYGLTKGFSSDMRDIEDNAIEGDPVCRLAFDVYEYRIAKYIGAYAAAMNGVDAIVFTAGVGENSPIMREEIIENYLGYLGIKIDKEANDFKGEEKIISTPDSKVIAMVVPTNEELMIAKDTKEIIEKGLDELKI

SEQ ID NO: 355 - DNA, 1251 bp, synthetic construct
  misc_feature 1..1251: note = Variant of acetate kinase
  source 1..1251: mol_type = other DNA
atgcaccatcatcatcatcatggcggtagcggcatgaaagttctggtgattaattctggtagctcctccatcaaatatcagctcctcgatatgaccaacgaaaaggtattagcgaaaggcttggtcgagcgcattggcatcgacggttcgcgtcttgtgcataaagttaacggcgaaaaacacgtgctggaacatgagattaagaatcacgaaattggacttaaattggtcctggatcttcttacggacgaaaaatacggtgtgttgaaggatctcaaagaaatcgatgcagttgggcatcgcgtagtacatggcggcgagcgttttgccagtagcgtgaagattactgacgaagtcttaaagaccatcgagacgttgtcgttcttagctccgttacacaatccagcgaacattatgggtatcaagagcagcatgaaattattaccgggtgtgcctcaagttgccgtctttgatacagcgttccaccagaagatgccggagaaagcctatttgtacgcaatcccctatgagtactacgagaaatataaaattcgccgctatgggtttcatggaacctcacatcgttatgtgagtaaacgtgctgcggaaattatgggcaaaccgtacgatcagctcaagatcattaccgttcacgtgggtaacggcgcatcagttgcggcggtgaagaatggcgtatctgttgacacttccatgggtttcacaccacttgaaggtcttgtcatgggcacgcgcagcggcgatattgatccggccatcgtggaatttcttgagaaagaagaaggattgtcggccaaagaagtcgtcaacatcctcaacaagaaatctggtgtgtatgggctcaccaaaggctttagtagtgacatgcgtgacattgaagataatgctattgaaggtgatcctgtatgccgccttgcattcgatgtgtacgaatatcgtatcgcgaaatatattggcgcatacgctgcggccatgaacggtgttgacgcgatcgtctttaccgcaggagttggcgaaaatagccgcattatgcgcgaagaaattattgagaactacttgggctacttagggatcaagatcgataaagaagccaatcgcttcaaaggtgaggagaagatcatttcaacgcccgattccaaagtgattgcgatggtagttccgaccaacgaggagctcatgatcgccaaagacacgaaagaaatcattgagaaagggttggacgagcttaagatc

SEQ ID NO: 356 - protein, 417 aa, synthetic construct
  REGION 1..417: note = Variant of acetate kinase
MHHHHHHGGSGMKVLVINSGSSSIKYQLLDMTNEKVLAKGLVERIGIDGSRLVHKVNGEKHVLEHEIKNHEIGLKLVLDLLTDEKYGVLKDLKEIDAVGHRVVHGGERFASSVKITDEVLKTIETLSFLAPLHNPANIMGIKSSMKLLPGVPQVAVFDTAFHQKMPEKAYLYAIPYEYYEKYKIRRYGFHGTSHRYVSKRAAEIMGKPYDQLKIITVHVGNGASVAAVKNGVSVDTSMGFTPLEGLVMGTRSGDIDPAIVEFLEKEEGLSAKEVVNILNKKSGVYGLTKGFSSDMRDIEDNAIEGDPVCRLAFDVYEYRIAKYIGAYAAAMNGVDAIVFTAGVGENSRIMREEIIENYLGYLGIKIDKEANRFKGEEKIISTPDSKVIAMVVPTNEELMIAKDTKEIIEKGLDELKI

SEQ ID NO: 357 - DNA, 1251 bp, synthetic construct
  misc_feature 1..1251: note = Variant of acetate kinase
  source 1..1251: mol_type = other DNA
atgcaccatcatcatcatcatggcggtagcggcatgaaagttctggtgattaattctggtagctcctccatcaaatatcagctcctcgatatgaccaacgaaaaggtattagcgaaaggcttggtcgagcgcattggcatcgacggttcgcgtcttgtgcataaagttaacggcgaaaaacacgtgctggaacatgagattaagaatcacgaaattggacttaaattggtcctggatcttcttacggacgaaaaatacggtgtgttgaaggatctcaaagaaatcgatgcagttgggcatcgcgtagtacatggcggcgagcgttttgccagtagcgtgaagattactgacgaagtcttaaagaccatcgagacgttgtcgttcttagctccgttacacaatccactgaacattatgggtatcaagagcagcatgaaattactgccgggtgtgcctcaagttgccgtctttgatacagcgttccaccagaagatgccggagaaagcctatttgtacgcaatcccctatgagtactacgagaaatataaaattcgccgctatgggtttcatggaacctcacatcgttatgtgagtaaacgtgctgcggaaattatgggcaaaccgtacgatcagctcaagatcattaccgttcacgtgggtaacggcgcatcagttgcggcggtgaagaatggcgtatctgttgacacttccatgggtttcacaccacttgaaggtcttgtcatgggcacgcgcagcggcgatattgatccggccatcgtggaatttcttgagaaagaagaaggattgtcggccaaagaagtcgtcaacatcctcaacaagaaatctggtgtgtatgggctcaccaaaggctttagtagtgacatgcgtgacattgaagataatgctattgaaggtgatcctgtatgccgccttgcattcgatgtgtacgaatatcgtatcgcgaaatatattggcgcatacgctgcggccatgaacggtgttgacgcgatcgtctttaccgcaggagttggcgaaaatagcccgattatgcgcgaagaaattattgagaactacttgggctacttagggatcaagatcgataaagaagccaatcgcttcaaaggtgaggagaagatcatttcaacgcccgattccaaagtgattgcgatggtaattccgaccaacgaggagctcatgatcgccaaagacacgaaagaaatcattgagaaagggttggacgagcttaagatc

SEQ ID NO: 358 - protein, 417 aa, synthetic construct
  REGION 1..417: note = Variant of acetate kinase
MHHHHHHGGSGMKVLVINSGSSSIKYQLLDMTNEKVLAKGLVERIGIDGSRLVHKVNGEKHVLEHEIKNHEIGLKLVLDLLTDEKYGVLKDLKEIDAVGHRVVHGGERFASSVKITDEVLKTIETLSFLAPLHNPLNIMGIKSSMKLLPGVPQVAVFDTAFHQKMPEKAYLYAIPYEYYEKYKIRRYGFHGTSHRYVSKRAAEIMGKPYDQLKIITVHVGNGASVAAVKNGVSVDTSMGFTPLEGLVMGTRSGDIDPAIVEFLEKEEGLSAKEVVNILNKKSGVYGLTKGFSSDMRDIEDNAIEGDPVCRLAFDVYEYRIAKYIGAYAAAMNGVDAIVFTAGVGENSPIMREEIIENYLGYLGIKIDKEANRFKGEEKIISTPDSKVIAMVIPTNEELMIAKDTKEIIEKGLDELKI

SEQ ID NO: 359 - DNA, 1251 bp, synthetic construct
  misc_feature 1..1251: note = Variant of acetate kinase
  source 1..1251: mol_type = other DNA
atgcaccatcatcatcatcatggcggtagcggcatgaaagttctggtgattaattctggtagctcctccatcaaatatcagctcctcgatatgaccaacgaaaaggtattagcgaaaggcttggtcgagcgcattggcatcgacggttcgcgtcttgtgcataaagttaacggcgaaaaacacgtgctggaacatgagattaagaatcacgaaattggacttaaattggtcctggatcttcttacggacgaaaaatacggtgtgttgaaggatctcaaagaaatcgatgcagttgggcatcgcgtagtacatggcggcgagcgttttgccagtagcgtgaagattactgacgaagtcttaaagaccatcgagacgttgtcgttcttagctccgttacacaatccagcgaacattatgggtatcaagagcagcatgaaattaatgccgggtgtgcctcaagttgccgtctttgatacagcgttccaccagaagatgccggagaaagcctatttgtacgcaatcccctatgagtactacgagaaatataaaattcgccgctatgggtttcatggaacctcacatcgttatgtgagtaaacgtgctgcggaaattatgggcaaaccgtacgatcagctcaagatcattaccgttcacgtgggtaacggcgcatcagttgcggcggtgaagaatggcgtatctgttgacacttccatgggtttcacaccacttgaaggtcttgtcatgggcacgcgcagcggcgatattgatccggccatcgtggaatttcttgagaaagaagaaggattgtcggccaaagaagtcgtcaacatcctcaacaagaaatctggtgtgtatgggctcaccaaaggctttagtagtgacatgcgtgacattgaagataatgctattgaaggtgatcctgtatgccgccttgcattcgatgtgtacgaatatcgtatcgcgaaatatattggcgcatacgctgcggccatgaacggtgttgacgcgatcgtctttaccgcaggagttggcgaaaatagcccgattatgcgcgaagaaattattgagaactacttgggctacttagggatcaagatcgataaagaagccaatgatttcaaaggtgaggagaagatcatttcaacgcccgattccaaagtgattgcgatggtaattccgaccaacgaggagctcatgatcgccaaagacacgaaagaaatcattgagaaagggttggacgagcttaagatc

SEQ ID NO: 360 - protein, 417 aa, synthetic construct
  REGION 1..417: note = Variant of acetate kinase
MHHHHHHGGSGMKVLVINSGSSSIKYQLLDMTNEKVLAKGLVERIGIDGSRLVHKVNGEKHVLEHEIKNHEIGLKLVLDLLTDEKYGVLKDLKEIDAVGHRVVHGGERFASSVKITDEVLKTIETLSFLAPLHNPANIMGIKSSMKLMPGVPQVAVFDTAFHQKMPEKAYLYAIPYEYYEKYKIRRYGFHGTSHRYVSKRAAEIMGKPYDQLKIITVHVGNGASVAAVKNGVSVDTSMGFTPLEGLVMGTRSGDIDPAIVEFLEKEEGLSAKEVVNILNKKSGVYGLTKGFSSDMRDIEDNAIEGDPVCRLAFDVYEYRIAKYIGAYAAAMNGVDAIVFTAGVGENSPIMREEIIENYLGYLGIKIDKEANDFKGEEKIISTPDSKVIAMVIPTNEELMIAKDTKEIIEKGLDELKI

SEQ ID NO: 361 - DNA, 1251 bp, synthetic construct
  misc_feature 1..1251: note = Variant of acetate kinase
  source 1..1251: mol_type = other DNA
atgcaccatcatcatcatcatggcggtagcggcatgaaagttctggtgattaattctggtagctcctccatcaaatatcagctcctcgatatgaccaacgaaaaggtattagcgaaaggcttggtcgagcgcattggcatcgacggttcgcgtatcgtgcataaagttaacggcgaaaaacacgtgctggaacatgagattccgaatcacgaaattggacttaaattggtcctggatcttcttacggacgaaaaatacggtgtgttgaaggatctcaaagaaatcgatgcagttgggcatcgcgtagtacatggcggcgagcgttttgccagtagcgtgaagattactgacgaagtcttaaagaccatcgagacgttgtcgttcttagctccgttacacaatccagtgaacattatgggtatcaagagcagcatgaaattattaccgggtgtgcctcaagttgccgtctttgatacagcgttccaccagaagatgccggagaaagcctatttgtacgcaatcccctatgagtactacgagaaatataaaattcgccgctatgggtttcatggaacctcacatcgttatgtgagtaaacgtgctgcggaaattctgggcaaaccgtacgatcagctcaagatcattaccgttcacgtgggtaacggcgcatcagttgcggcggtgaagaatggcgtatctgttgacacttccatgggtttcacaccacttgaaggtcttgtcatgggcacgcgcagcggcgatattgatccggccatcgtggaatttcttgagaaagaagaaggattgtcggccaaagaagtcgtcaacatcctcaacaagaaatctggtgtgtatgggctcaccaaaggctttagtagtgacatgcgtgacattgaagataatgctattgaaggtgatcctgtatgccgccttgcattcgatgtgtacgaatatcgtatcgcgaaatatattggcgcatacgctgcggccatgaacggtgttgacgcgatcgtctttaccgcaggagttggcgaaaatagcccgattatgcgccatgaaattattgagaactacttgggctacttagggatcaagatcgataaagaagccaatgacttcaaaggtgaggagaagatcatttcaacgcccgattccaaagtgattgcgatggtagttccgaccaacgaggagctcatgatcgccaaagacacgaaagaaatcattgagaaagggttggacgagcttaagatc

SEQ ID NO: 362 - protein, 417 aa, synthetic construct
  REGION 1..417: note = Variant of acetate kinase
MHHHHHHGGSGMKVLVINSGSSSIKYQLLDMTNEKVLAKGLVERIGIDGSRIVHKVNGEKHVLEHEIPNHEIGLKLVLDLLTDEKYGVLKDLKEIDAVGHRVVHGGERFASSVKITDEVLKTIETLSFLAPLHNPVNIMGIKSSMKLLPGVPQVAVFDTAFHQKMPEKAYLYAIPYEYYEKYKIRRYGFHGTSHRYVSKRAAEILGKPYDQLKIITVHVGNGASVAAVKNGVSVDTSMGFTPLEGLVMGTRSGDIDPAIVEFLEKEEGLSAKEVVNILNKKSGVYGLTKGFSSDMRDIEDNAIEGDPVCRLAFDVYEYRIAKYIGAYAAAMNGVDAIVFTAGVGENSPIMRHEIIENYLGYLGIKIDKEANDFKGEEKIISTPDSKVIAMVVPTNEELMIAKDTKEIIEKGLDELKI

SEQ ID NO: 363 - DNA, 1251 bp, synthetic construct
  misc_feature 1..1251: note = Variant of acetate kinase
  source 1..1251: mol_type = other DNA
atgcaccatcatcatcatcatggcggtagcggcatgaaagttctggtgattaattctggtagctcctccatcaaatatcagctcctcgatatgaccaacgaaaaggtattagcgaaaggcttggtcgagcgcattggcatcgacggttcgcgtatcgtgcataaagttaacggcgaaaaacacgtgctggaacatgagattaagaatcacgaaattggacttaaattggtcctggatcttcttacggacgaaaaatacggtgtgttgaaggatctcaaagaaatcgatgcagttgggcatcgcgtagtacatggcggcgagcgttttgccagtagcgtgaagattactgacgaagtcttaaagaccatcgagacgttgtcgttcttagctccgttacacaatccagcgaacattatgggtatcaagagcagcatgaaattattaccgggtgtgcctcaagttgccgtctttgatacagcgttccaccagaagatgccggagaaagcctatttgtacgcaatcccctatgagtactacgagaaatataaaattcgccgctatgggtttcatggaacctcacatcgttatgtgagtaaacgtgctgcggaaattctgggcaaaccgtacgatcagctcaagatcattaccgttcacgtgggtaacggcgcatcagttgcggcggtgaagaatggcgtatctgttgacacttccatgggtttcacaccacttgaaggtcttgtcatgggcacgcgcagcggcgatattgatccggccatcgtggaatttcttgagaaagaagaaggattgtcggccaaagaagtcgtcaacatcctcaacaagaaatctggtgtgtatgggctcaccaaaggctttagtagtgacatgcgtgacattgaagataatgctattgaaggtgatcctgtatgccgccttgcatttgatgtgtacgaatatcgtatcgcgaaatatattggcgcatacgctgcggccatgaacggtgttgacgcgatcgtctttaccgcaggagttggcgaaaatagcccgattatgcgccatgaaattattgagaactacttgggctacttagggatcaagatcgataaagaagccaatgacgttaaaggtgaggagaagatcatttcaacgcccgattccaaagtgattgcgatggtagttccgaccaacgaggagctcatgatcgccaaagacacgaaagaaatcgttgagaaagggttggacgagcttaagatc

SEQ ID NO: 364 - protein, 417 aa, synthetic construct
  REGION 1..417: note = Variant of acetate kinase
MHHHHHHGGSGMKVLVINSGSSSIKYQLLDMTNEKVLAKGLVERIGIDGSRIVHKVNGEKHVLEHEIKNHEIGLKLVLDLLTDEKYGVLKDLKEIDAVGHRVVHGGERFASSVKITDEVLKTIETLSFLAPLHNPANIMGIKSSMKLLPGVPQVAVFDTAFHQKMPEKAYLYAIPYEYYEKYKIRRYGFHGTSHRYVSKRAAEILGKPYDQLKIITVHVGNGASVAAVKNGVSVDTSMGFTPLEGLVMGTRSGDIDPAIVEFLEKEEGLSAKEVVNILNKKSGVYGLTKGFSSDMRDIEDNAIEGDPVCRLAFDVYEYRIAKYIGAYAAAMNGVDAIVFTAGVGENSPIMRHEIIENYLGYLGIKIDKEANDVKGEEKIISTPDSKVIAMVVPTNEELMIAKDTKEIVEKGLDELKI

SEQ ID NO: 365 - DNA, 1251 bp, synthetic construct
  misc_feature 1..1251: note = Variant of acetate kinase
  source 1..1251: mol_type = other DNA
atgcaccatcatcatcatcatggcggtagcggcatgaaagttctggtgattaattctggtagctcctccatcaaatatcagctcctcgatatgaccaacgaaaaggtattagcgaaaggcttggtcgagcgcattggcatcgacggttcgcgtattgtgcataaagttaacggcgaaaaacacgtgctggaacatgagattaaggatcacgaaattggacttaaattggtcctggatcttcttacggacgaaaaatacggtgtgttgaaggatctcaaagaaatcgatgcagttgggcatcgcgtagtacatggcggcgagcgttttgccagtagcgtgaagattactgacgaagtcttaaagaccatcgagacgttgtcgttcttagctccgttacacaatccagcgaacattatgggtatcaagagcagcatgaaattactgccgggtgtgcctcaagttgccgtctttgatacagcgttccaccagaagatgccggagaaagcctatttgtacgcaatcccctatgagtactacgagaaatataaaattcgccgctatgggtttcatggaacctcacatcgttatgtgagtaaacgtgctgcggaaattatgggcaaaccgtacgatcagctcaagatcattaccgttcacgtgggtaacggcgcatcagttgcggcggtgaagaatggcgtatctgttgacacttccatgggtttcacaccacttgaaggtcttgtcatgggcacgcgcagcggcgatattgatccggccatcgtggaatttcttgagaaagaagaaggattgtcggccaaagaagtcgtcaacatcctcaacaagaaatctggtgtgtatgggctcaccaaaggctttagtagtgacatgcgtgacattgaagataatgctattgaaggtgatcctgtatgccgccttgcattcgatgtgtacgaatatcgtatcgcgaaatatattggcgcatacgctgcggccatgaacggtgttgacgcgatcgtctttaccgcaggagttggcgaaaatagcccgattatgcgcgaagaaattattgagaactacttgggctacttagggatcaagatcgataaagaagccaatgatttcaaaggtgaggagaagatcatttcaacgcccgattccaaagtgattgcgatggtaattccgaccaacgaggagctcatgatcgccaaagacacgaaagaaatcattgagaaagggttggacgagcttaagatc

SEQ ID NO: 366 - protein, 417 aa, synthetic construct
  REGION 1..417: note = Variant of acetate kinase
MHHHHHHGGSGMKVLVINSGSSSIKYQLLDMTNEKVLAKGLVERIGIDGSRIVHKVNGEKHVLEHEIKDHEIGLKLVLDLLTDEKYGVLKDLKEIDAVGHRVVHGGERFASSVKITDEVLKTIETLSFLAPLHNPANIMGIKSSMKLLPGVPQVAVFDTAFHQKMPEKAYLYAIPYEYYEKYKIRRYGFHGTSHRYVSKRAAEIMGKPYDQLKIITVHVGNGASVAAVKNGVSVDTSMGFTPLEGLVMGTRSGDIDPAIVEFLEKEEGLSAKEVVNILNKKSGVYGLTKGFSSDMRDIEDNAIEGDPVCRLAFDVYEYRIAKYIGAYAAAMNGVDAIVFTAGVGENSPIMREEIIENYLGYLGIKIDKEANDFKGEEKIISTPDSKVIAMVIPTNEELMIAKDTKEIIEKGLDELKI

SEQ ID NO: 367 - DNA, 1251 bp, synthetic construct
  misc_feature 1..1251: note = Variant of acetate kinase
  source 1..1251: mol_type = other DNA
atgcaccatcatcatcatcatggcggtagcggcatgaaagttctggtgattaattctggtagctcctccatcaaatatcagctcctcgatatgaccaacgaaaaggtattagcgaaaggcttggtcgagcgcattggcatcgacggttcgcgtatcgtgcataaagttaacggcgaaaaacacgtgctggaacatgagattaaaaatcacgaaattggacttaaattggtcctggatcttcttacggacgaaaaatacggtgtgttgaaggatctcaaagaaatcgatgcagttgggcatcgcgtagtacatggcggcgagcgttttgccagtagcgtgaagattactgacgaagtcttaaagaccatcgagacgttgtcgttcttagctccgttacacaatccagtgaacattatgggtatcaagagcagcatgaaactattaccgggtgtgcctcaagttgccgtctttgatacagcgttccaccagaagatgccggagaaagcctatttgtacgcaatcccctatgagtactacgagaaatataaaattcgccgctatgggtttcatggaacctcacatcgttatgtgagtaaacgtgctgcggaaattctgggcaaaccgtacgatcagctcaagatcattaccgttcacgtgggtaacggcgcatcagttgcggcggtgaagaatggcgtatctgttgacacttccatgggtttcacaccacttgaaggtcttgtcatgggcacgcgcagcggcgatattgatccggccatcgtggaatttcttgagaaagaagaaggattgtcggccaaagaagtcgtcaacatcctcaacaagaaatctggtgtgtatgggctcaccaaaggctttagtagtgacatgcgtgacattgaagataatgctattgaaggtgatcctgtatgccgccttgcatttgatgtgtacgaatatcgtatcgcgaaatatattggcgcatacgctgcggccatgaacggtgttgacgcgatcgtctttaccgcaggagttggcgaaaatagcccgattatgcgccatgaaattattgagaactacttgggctacttagggatcaagatcgataaagaagccaatgacttcaaaggtgaggagaagatcatttcaacgcccgattccaaagtgattgcgatggtagttccgaccaacgaggagctcatgatcgccaaagacacgaaagaaatcattgagaaagggttggacgagcttaagatc

SEQ ID NO: 368 - protein, 417 aa, synthetic construct
  REGION 1..417: note = Variant of acetate kinase
MHHHHHHGGSGMKVLVINSGSSSIKYQLLDMTNEKVLAKGLVERIGIDGSRIVHKVNGEKHVLEHEIKNHEIGLKLVLDLLTDEKYGVLKDLKEIDAVGHRVVHGGERFASSVKITDEVLKTIETLSFLAPLHNPVNIMGIKSSMKLLPGVPQVAVFDTAFHQKMPEKAYLYAIPYEYYEKYKIRRYGFHGTSHRYVSKRAAEILGKPYDQLKIITVHVGNGASVAAVKNGVSVDTSMGFTPLEGLVMGTRSGDIDPAIVEFLEKEEGLSAKEVVNILNKKSGVYGLTKGFSSDMRDIEDNAIEGDPVCRLAFDVYEYRIAKYIGAYAAAMNGVDAIVFTAGVGENSPIMRHEIIENYLGYLGIKIDKEANDFKGEEKIISTPDSKVIAMVVPTNEELMIAKDTKEIIEKGLDELKI

SEQ ID NO: 369 - DNA, 1251 bp, synthetic construct
  misc_feature 1..1251: note = Variant of acetate kinase
  source 1..1251: mol_type = other DNA
atgcaccatcatcatcatcatggcggtagcggcatgaaagttctggtgattaattctggtagctcctccatcaaatatcagctcctcgatatgaccaacgaaaaggtattagcgaaaggcttggtcgagcgcattggcatcgacggttcgcgtatcgtgcataaagttaacggcgaaaaacacgtgctggaacatgagattaagaatcacgaaattggacttaaattggtcctggatcttcttacggacgaaaaatacggtgtgttgaaggatctcaaagaaatcgatgcagttgggcatcgcgtagtacatggcggcgagcgttttgccagtagcgtgaagattactgacgaagtcttaaagaccatcgagacgttgtcgttcttagctccgttacacaatccagcgaacattatgggtatcaagagcagcatgaaattattaccgggtgtgcctcaagttgccgtctttgatacagcgttccaccagaagatgccggagaaagcctatttgtacgcaatcccctatgagtactacgagaaatataaaattcgccgctatgggtttcatggaacctcacatcgttatgtgagtaaacgtgctgcggaaattctgggcaaaccgtacgatcagctcaagatcattaccgttcacgtgggtaacggcgcatcagttgcggcggtgaagaatggcgtatctgttgacacttccatgggtttcacaccacttgaaggtcttgtcatgggcacgcgcagcggcgatattgatccggccatcgtggaatttcttgagaaagaagaaggattgtcggccaaagaagtcgtcaacatcctcaacaagaaatctggtgtgtatgggctcaccaaaggctttagtagtgacatgcgtgacattgaagataatgctattgaaggtgatcctgtatgccgccttgcatttgatgtgtacgaatatcgtatcgcgaaatatattggcgcatacgctgcggccatgaacggtgttgacgcgatcgtctttaccgcaggagttggcgaaaatagcccgattatgcgcgaagaaattattgagaactacttgggctacttagggatcaagatcgataaagaagccaatgactttaaaggtgaggagaagatcatttcaacgcccgattccaaagtgattgcgatggtagttccgaccaacgaggagctcatgatcgccaaagacacgaaagaaatcgttgagaaagggttggacgagcttaagatc

SEQ ID NO: 370 - protein, 417 aa, synthetic construct
  REGION 1..417: note = Variant of acetate kinase
MHHHHHHGGSGMKVLVINSGSSSIKYQLLDMTNEKVLAKGLVERIGIDGSRIVHKVNGEKHVLEHEIKNHEIGLKLVLDLLTDEKYGVLKDLKEIDAVGHRVVHGGERFASSVKITDEVLKTIETLSFLAPLHNPANIMGIKSSMKLLPGVPQVAVFDTAFHQKMPEKAYLYAIPYEYYEKYKIRRYGFHGTSHRYVSKRAAEILGKPYDQLKIITVHVGNGASVAAVKNGVSVDTSMGFTPLEGLVMGTRSGDIDPAIVEFLEKEEGLSAKEVVNILNKKSGVYGLTKGFSSDMRDIEDNAIEGDPVCRLAFDVYEYRIAKYIGAYAAAMNGVDAIVFTAGVGENSPIMREEIIENYLGYLGIKIDKEANDFKGEEKIISTPDSKVIAMVVPTNEELMIAKDTKEIVEKGLDELKI

SEQ ID NO: 371 - DNA, 1251 bp, synthetic construct
  misc_feature 1..1251: note = Variant of acetate kinase
  source 1..1251: mol_type = other DNA
atgcaccatcatcatcatcatggcggtagcggcatgaaagttctggtgattaattctggtagctcctccatcaaatatcagctcctcgatatgaccaacgaaaaggtattagcgaaaggcttggtcgagcgcattggcatcgacggttcgcgtatcgtgcataaagttaacggcgaaaaacacgtgctggaacatgagattaaaaatcacgaaattggacttaaattggtcctggatcttcttacggacgaaaaatacggtgtgttgaaggatctcaaagaaatcgatgcagttgggcatcgcgtagtacatggcggcgagcgttttgccagtagcgtgaagattactgacgaagtcttaaagaccatcgagacgttgtcgttcttagctccgttacacaatccagcgaacattatgggtatcaagagcagcatgaaattattaccgggtgtgcctcaagttgccgtctttgatacagcgttccaccagaagatgccggagaaagcctatttgtacgcaatcccctatgagtactacgagaaatataaaattcgccgctatgggtttcatggaacctcacatcgttatgtgagtaaacgtgctgcggaaattctgggcaaaccgtacgatcagctcaagatcattaccgttcacgtgggtaacggcgcatcagttgcggcggtgaagaatggcgtatctgttgacacttccatgggtttcacaccacttgaaggtcttgtcatgggcacgcgcagcggcgatattgatccggccatcgtggaatttcttgagaaagaagaaggattgtcggccaaagaagtcgtcaacatcctcaacaagaaatctggtgtgtatgggctcaccaaaggctttagtagtgacatgcgtgacattgaagataatgctattgaaggtgatcctgtatgccgccttgcatttgatgtgtacgaatatcgtatcgcgaaatatattggcgcatacgctgcggccatgaacggtgttgacgcgatcgtctttaccgcaggagttggcgaaaatagcccgattatgcgccatgaaattattgagaactacttgggctacttagggatcaagatcgataaagaagccaatgacttcaaaggtgaggagaagatcatttcaacgcccgattccaaagtgattgcgatggtagttccgaccaacgaggagctcatgatcgccaaagacacgaaagaaatcgttgagaaagggttggacgagcttaagatc

SEQ ID NO: 372 - protein, 417 aa, synthetic construct
  REGION 1..417: note = Variant of acetate kinase
MHHHHHHGGSGMKVLVINSGSSSIKYQLLDMTNEKVLAKGLVERIGIDGSRIVHKVNGEKHVLEHEIKNHEIGLKLVLDLLTDEKYGVLKDLKEIDAVGHRVVHGGERFASSVKITDEVLKTIETLSFLAPLHNPANIMGIKSSMKLLPGVPQVAVFDTAFHQKMPEKAYLYAIPYEYYEKYKIRRYGFHGTSHRYVSKRAAEILGKPYDQLKIITVHVGNGASVAAVKNGVSVDTSMGFTPLEGLVMGTRSGDIDPAIVEFLEKEEGLSAKEVVNILNKKSGVYGLTKGFSSDMRDIEDNAIEGDPVCRLAFDVYEYRIAKYIGAYAAAMNGVDAIVFTAGVGENSPIMRHEIIENYLGYLGIKIDKEANDFKGEEKIISTPDSKVIAMVVPTNEELMIAKDTKEIVEKGLDELKI

SEQ ID NO: 373 - DNA, 1251 bp, synthetic construct
  misc_feature 1..1251: note = Variant of acetate kinase
  source 1..1251: mol_type = other DNA
atgcaccatcatcatcatcatggcggtagcggcatgaaagttctggtgattaattctggtagctcctccatcaaatatcagctcctcgatatgaccaacgaaaaggtattagcgaaaggcttggtcgagcgcattggcatcgacggttcgcgtatcgtgcataaagttaacggcgaaaaacacgtgctggaacatgagattaagaatcacgaaattggacttaaattggtcctggatcttcttacggacgaaaaatacggtgtgttgaaggatctcaaagaaatcgatgcagttgggcatcgcgtagtacatggcggcgagcgttttgccagtagcgtgaagattactgacgaagtcttaaagaccatcgagacgttgtcgttcttagctccgttacacaatccagcgaacattatgggtatcaagagcagcatgaaactgttaccgggtgtgcctcaagttgccgtctttgatacagcgttccaccagaagatgccggagaaagcctatttgtacgcaatcccctatgagtactacgagaaatataaaattcgccgctatgggtttcatggaacctcacatcgttatgtgagtaaacgtgctgcggaaattatgggcaaaccgtacgatcagctcaagatcattaccgttcacgtgggtaacggcgcatcagttgcggcggtgaagaatggcgtatctgttgacacttccatgggtttcacaccacttgaaggtcttgtcatgggcacgcgcagcggcgatattgatccggccatcgtggaatttcttgagaaagaagaaggattgtcggccaaagaagtcgtcaacatcctcaacaagaaatctggtgtgtatgggctcaccaaaggctttagtagtgacatgcgtgacattgaagataatgctattgaaggtgatcctgtatgccgccttgcattcgatgtgtacgaatatcgtatcgcgaaatatattggcgcatacgctgcggccatgaacggtgttgacgcgatcgtctttaccgcaggagttggcgaaaatagcccgattatgcgcgaagaaattattgagaactacttgggctacttagggatcaagatcgataaagaagccaatgacttcaaaggtgaggagaagatcatttcaacgcccgattccaaagtgattgcgatggtagttccgaccaacgaggagctcatgatcgccaaagacacgaaagaaatcgttgagaaagggttggacgagcttaagatc

SEQ ID NO: 374 - protein, 417 aa, synthetic construct
  REGION 1..417: note = Variant of acetate kinase
MHHHHHHGGSGMKVLVINSGSSSIKYQLLDMTNEKVLAKGLVERIGIDGSRIVHKVNGEKHVLEHEIKNHEIGLKLVLDLLTDEKYGVLKDLKEIDAVGHRVVHGGERFASSVKITDEVLKTIETLSFLAPLHNPANIMGIKSSMKLLPGVPQVAVFDTAFHQKMPEKAYLYAIPYEYYEKYKIRRYGFHGTSHRYVSKRAAEIMGKPYDQLKIITVHVGNGASVAAVKNGVSVDTSMGFTPLEGLVMGTRSGDIDPAIVEFLEKEEGLSAKEVVNILNKKSGVYGLTKGFSSDMRDIEDNAIEGDPVCRLAFDVYEYRIAKYIGAYAAAMNGVDAIVFTAGVGENSPIMREEIIENYLGYLGIKIDKEANDFKGEEKIISTPDSKVIAMVVPTNEELMIAKDTKEIVEKGLDELKI

SEQ ID NO: 375 - DNA, 1251 bp, synthetic construct
  misc_feature 1..1251: note = Variant of acetate kinase
  source 1..1251: mol_type = other DNA
atgcaccatcatcatcatcatggcggtagcggcatgaaagttctggtgattaattctggtagctcctccatcaaatatcagctcctcgatatgaccaacgaaaaggtattagcgaaaggcttggtcgagcgcattggcatcgacggttcgcgtcttgtgcataaagttaacggcgaaaaacacgtgctggaacatgagattaagaatcacgaaattggacttaaattggtcctggatcttcttacggacgaaaaatacggtgtgttgaaggatctcaaagaaatcgatgcagttgggcatcgcgtagtacatggcggcgagcgttttgccagtagcgtgaagattactgacgaagtcttaaagaccatcgagacgttgtcgttcttagctccgttacacaatccactgaacattatgggtatcaagagcagcatgaaattattaccgggtgtgcctcaagttgccgtctttgatacagcgttccaccagaagatgccggagaaagcctatttgtacgcaatcccctatgagtactacgagaaatataaaattcgccgctatgggtttcatggaacctcacatcgttatgtgagtaaacgtgctgcggaaattatgggcaaaccgtacgatcagctcaagatcattaccgttcacgtgggtaacggcgcatcagttgcggcggtgaagaatggcgtatctgttgacacttccatgggtttcacaccacttgaaggtcttgtcatgggcacgcgcagcggcgatattgatccggccatcgtggaatttcttgagaaagaagaaggattgtcggccaaagaagtcgtcaacatcctcaacaagaaatctggtgtgtatgggctcaccaaaggctttagtagtgacatgcgtgacattgaagataatgctattgaaggtgatcctgtatgccgccttgcattcgatgtgtacgaatatcgtatcgcgaaatatattggcgcatacgctgcggccatgaacggtgttgacgcgatcgtctttaccgcaggagttggcgaaaatagccgcattatgcgcgaagaaattattgagaactacttgggctacttagggatcaagatcgataaagaagccaatgacttcaaaggtgaggagaagatcatttcaacgcccgattccaaagtgattgcgatggtagttccgaccaacgaggagctcatgatcgccaaagacacgaaagaaatcattgagaaagggttggacgagcttaagatc

SEQ ID NO: 376 - protein, 417 aa, synthetic construct
  REGION 1..417: note = Variant of acetate kinase
MHHHHHHGGSGMKVLVINSGSSSIKYQLLDMTNEKVLAKGLVERIGIDGSRLVHKVNGEKHVLEHEIKNHEIGLKLVLDLLTDEKYGVLKDLKEIDAVGHRVVHGGERFASSVKITDEVLKTIETLSFLAPLHNPLNIMGIKSSMKLLPGVPQVAVFDTAFHQKMPEKAYLYAIPYEYYEKYKIRRYGFHGTSHRYVSKRAAEIMGKPYDQLKIITVHVGNGASVAAVKNGVSVDTSMGFTPLEGLVMGTRSGDIDPAIVEFLEKEEGLSAKEVVNILNKKSGVYGLTKGFSSDMRDIEDNAIEGDPVCRLAFDVYEYRIAKYIGAYAAAMNGVDAIVFTAGVGENSRIMREEIIENYLGYLGIKIDKEANDFKGEEKIISTPDSKVIAMVVPTNEELMIAKDTKEIIEKGLDELKI

SEQ ID NO: 377 - DNA, 1251 bp, synthetic construct
  misc_feature 1..1251: note = Variant of acetate kinase
  source 1..1251: mol_type = other DNA
atgcaccatcatcatcatcatggcggtagcggcatgaaagttctggtgattaattctggtagctcctccatcaaatatcagctcctcgatatgaccaacgaaaaggtattagcgaaaggcttggtcgagcgcattggcatcgacggttcgcgtcttgtgcataaagttaacggcgaaaaacacgtgctggaacatgagattaaggatcacgaaattggacttaaattggtcctggatcttcttacggacgaaaaatacggtgtgttgaaggatctcaaagaaatcgatgcagttgggcatcgcgtagtacatggcggcgagcgttttgccagtagcgtgaagattactgacgaagtcttaaagaccatcgagacgttgtcgttcttagctccgttacacaatccagcgaacattatgggtatcaagagcagcatgaaattactgccgggtgtgcctcaagttgccgtctttgatacagcgttccaccagaagatgccggagaaagcctatttgtacgcaatcccctatgagtactacgagaaatataaaattcgccgctatgggtttcatggaacctcacatcgttatgtgagtaaacgtgctgcggaaattatgggcaaaccgtacgatcagctcaagatcattaccgttcacgtgggtaacggcgcatcagttgcggcggtgaagaatggcgtatctgttgacacttccatgggtttcacaccacttgaaggtcttgtcatgggcacgcgcagcggcgatattgatccggccatcgtggaatttcttgagaaagaagaaggattgtcggccaaagaagtcgtcaacatcctcaacaagaaatctggtgtgtatgggctcaccaaaggctttagtagtgacatgcgtgacattgaagataatgctattgaaggtgatcctgtatgccgccttgcattcgatgtgtacgaatatcgtatcgcgaaatatattggcgcatacgctgcggccatgaacggtgttgacgcgatcgtctttaccgcaggagttggcgaaaatagcccgattatgcgcgaagaaattattgagaactacttgggctacttagggatcaagatcgataaagaagccaatgatttcaaaggtgaggagaagatcatttcaacgcccgattccaaagtgattgcgatggtagttccgaccaacgaggagctcatgatcgccaaagacacgaaagaaatcattgagaaagggttggacgagcttaagatc

SEQ ID NO: 378 - protein, 417 aa, synthetic construct
  REGION 1..417: note = Variant of acetate kinase
MHHHHHHGGSGMKVLVINSGSSSIKYQLLDMTNEKVLAKGLVERIGIDGSRLVHKVNGEKHVLEHEIKDHEIGLKLVLDLLTDEKYGVLKDLKEIDAVGHRVVHGGERFASSVKITDEVLKTIETLSFLAPLHNPANIMGIKSSMKLLPGVPQVAVFDTAFHQKMPEKAYLYAIPYEYYEKYKIRRYGFHGTSHRYVSKRAAEIMGKPYDQLKIITVHVGNGASVAAVKNGVSVDTSMGFTPLEGLVMGTRSGDIDPAIVEFLEKEEGLSAKEVVNILNKKSGVYGLTKGFSSDMRDIEDNAIEGDPVCRLAFDVYEYRIAKYIGAYAAAMNGVDAIVFTAGVGENSPIMREEIIENYLGYLGIKIDKEANDFKGEEKIISTPDSKVIAMVVPTNEELMIAKDTKEIIEKGLDELKI

SEQ ID NO: 379 - DNA, 1251 bp, synthetic construct
  misc_feature 1..1251: note = Variant of acetate kinase
  source 1..1251: mol_type = other DNA
atgcaccatcatcatcatcatggcggtagcggcatgaaagttctggtgattaattctggtagctcctccatcaaatatcagctcctcgatatgaccaacgaaaaggtattagcgaaaggcttggtcgagcgcattggcatcgacggttcgcgtcttgtgcataaagttaacggcgaaaaacacgtgctggaacatgagattaaggatcacgaaattggacttaaattggtcctggatcttcttacggacgaaaaatacggtgtgttgaaggatctcaaagaaatcgatgcagttgggcatcgcgtagtacatggcggcgagcgttttgccagtagcgtgaagattactgacgaagtcttaaagaccatcgagacgttgtcgttcttagctccgttacacaatccagcgaacattatgggtatcaagagcagcatgaaattattaccgggtgtgcctcaagttgccgtctttgatacagcgttccaccagaagatgccggagaaagcctatttgtacgcaatcccctatgagtactacgagaaatataaaattcgccgctatgggtttcatggaacctcacatcgttatgtgagtaaacgtgctgcggaaattatgggcaaaccgtacgatcagctcaagatcattaccgttcacgtgggtaacggcgcatcagttgcggcggtgaagaatggcgtatctgttgacacttccatgggtttcacaccacttgaaggtcttgtcatgggcacgcgcagcggcgatattgatccggccatcgtggaatttcttgagaaagaagaaggattgtcggccaaagaagtcgtcaacatcctcaacaagaaatctggtgtgtatgggctcaccaaaggctttagtagtgacatgcgtgacattgaagataatgctattgaaggtgatcctgtatgccgccttgcattcgatgtgtacgaatatcgtatcgcgaaatatattggcgcatacgctgcggccatgaacggtgttgacgcgatcgtctttaccgcaggagttggcgaaaatagcccgattatgcgcgaagaaattattgagaactacttgggctacttagggatcaagatcgataaagaagccaatgatttcaaaggtgaggagaagatcatttcaacgcccgattccaaagtgattgcgatggtaattccgaccaacgaggagctcatgatcgccaaagacacgaaagaaatcattgagaaagggttggacgagcttaagatc

SEQ ID NO: 380 - protein, 417 aa, synthetic construct
  REGION 1..417: note = Variant of acetate kinase
MHHHHHHGGSGMKVLVINSGSSSIKYQLLDMTNEKVLAKGLVERIGIDGSRLVHKVNGEKHVLEHEIKDHEIGLKLVLDLLTDEKYGVLKDLKEIDAVGHRVVHGGERFASSVKITDEVLKTIETLSFLAPLHNPANIMGIKSSMKLLPGVPQVAVFDTAFHQKMPEKAYLYAIPYEYYEKYKIRRYGFHGTSHRYVSKRAAEIMGKPYDQLKIITVHVGNGASVAAVKNGVSVDTSMGFTPLEGLVMGTRSGDIDPAIVEFLEKEEGLSAKEVVNILNKKSGVYGLTKGFSSDMRDIEDNAIEGDPVCRLAFDVYEYRIAKYIGAYAAAMNGVDAIVFTAGVGENSPIMREEIIENYLGYLGIKIDKEANDFKGEEKIISTPDSKVIAMVIPTNEELMIAKDTKEIIEKGLDELKI

SEQ ID NO: 381 - DNA, 1251 bp, synthetic construct
  misc_feature 1..1251: note = Variant of acetate kinase
  source 1..1251: mol_type = other DNA
atgcaccatcatcatcatcatggcggtagcggcatgaaagttctggtgattaattctggtagctcctccatcaaatatcagctcctcgatatgaccaacgaaaaggtattagcgaaaggcttggtcgagcgcattggcatcgacggttcgcgtattgtgcataaagttaacggcgaaaaacacgtgctggaacatgagattaaggatcacgaaattggacttaaattggtcctggatcttcttacggacgaaaaatacggtgtgttgaaggatctcaaagaaatcgatgcagttgggcatcgcgtagtacatggcggcgagcgttttgccagtagcgtgaagattactgacgaagtcttaaagaccatcgagacgttgtcgttcttagctccgttacacaatccactgaacattatgggtatcaagagcagcatgaaattactgccgggtgtgcctcaagttgccgtctttgatacagcgttccaccagaagatgccggagaaagcctatttgtacgcaatcccctatgagtactacgagaaatataaaattcgccgctatgggtttcatggaacctcacatcgttatgtgagtaaacgtgctgcggaaattatgggcaaaccgtacgatcagctcaagatcattaccgttcacgtgggtaacggcgcatcagttgcggcggtgaagaatggcgtatctgttgacacttccatgggtttcacaccacttgaaggtcttgtcatgggcacgcgcagcggcgatattgatccggccatcgtggaatttcttgagaaagaagaaggattgtcggccaaagaagtcgtcaacatcctcaacaagaaatctggtgtgtatgggctcaccaaaggctttagtagtgacatgcgtgacattgaagataatgctattgaaggtgatcctgtatgccgccttgcattcgatgtgtacgaatatcgtatcgcgaaatatattggcgcatacgctgcggccatgaacggtgttgacgcgatcgtctttaccgcaggagttggcgaaaatagccgcattatgcgcgaagaaattattgagaactacttgggctacttagggatcaagatcgataaagaagccaatcgcttcaaaggtgaggagaagatcatttcaacgcccgattccaaagtgattgcgatggtagttccgaccaacgaggagctcatgatcgccaaagacacgaaagaaatcattgagaaagggttggacgagcttaagatc

SEQ ID NO: 382 - protein, 417 aa, synthetic construct
  REGION 1..417: note = Variant of acetate kinase
MHHHHHHGGSGMKVLVINSGSSSIKYQLLDMTNEKVLAKGLVERIGIDGSRIVHKVNGEKHVLEHEIKDHEIGLKLVLDLLTDEKYGVLKDLKEIDAVGHRVVHGGERFASSVKITDEVLKTIETLSFLAPLHNPLNIMGIKSSMKLLPGVPQVAVFDTAFHQKMPEKAYLYAIPYEYYEKYKIRRYGFHGTSHRYVSKRAAEIMGKPYDQLKIITVHVGNGASVAAVKNGVSVDTSMGFTPLEGLVMGTRSGDIDPAIVEFLEKEEGLSAKEVVNILNKKSGVYGLTKGFSSDMRDIEDNAIEGDPVCRLAFDVYEYRIAKYIGAYAAAMNGVDAIVFTAGVGENSRIMREEIIENYLGYLGIKIDKEANRFKGEEKIISTPDSKVIAMVVPTNEELMIAKDTKEIIEKGLDELKI

SEQ ID NO: 383 - DNA, 1251 bp, synthetic construct
  misc_feature 1..1251: note = Variant of acetate kinase
  source 1..1251: mol_type = other DNA
atgcaccatcatcatcatcatggcggtagcggcatgaaagttctggtgattaattctggtagctcctccatcaaatatcagctcctcgatatgaccaacgaaaaggtattagcgaaaggcttggtcgagcgcattggcatcgacggttcgcgtattgtgcataaagttaacggcgaaaaacacgtgctggaacatgagattaaggatcacgaaattggacttaaattggtcctggatcttcttacggacgaaaaatacggtgtgttgaaggatctcaaagaaatcgatgcagttgggcatcgcgtagtacatggcggcgagcgttttgccagtagcgtgaagattactgacgaagtcttaaagaccatcgagacgttgtcgttcttagctccgttacacaatccactgaacattatgggtatcaagagcagcatgaaattaatgccgggtgtgcctcaagttgccgtctttgatacagcgttccaccagaagatgccggagaaagcctatttgtacgcaatcccctatgagtactacgagaaatataaaattcgccgctatgggtttcatggaacctcacatcgttatgtgagtaaacgtgctgcggaaattatgggcaaaccgtacgatcagctcaagatcattaccgttcacgtgggtaacggcgcatcagttgcggcggtgaagaatggcgtatctgttgacacttccatgggtttcacaccacttgaaggtcttgtcatgggcacgcgcagcggcgatattgatccggccatcgtggaatttcttgagaaagaagaaggattgtcggccaaagaagtcgtcaacatcctcaacaagaaatctggtgtgtatgggctcaccaaaggctttagtagtgacatgcgtgacattgaagataatgctattgaaggtgatcctgtatgccgccttgcattcgatgtgtacgaatatcgtatcgcgaaatatattggcgcatacgctgcggccatgaacggtgttgacgcgatcgtctttaccgcaggagttggcgaaaatagcccgattatgcgcgaagaaattattgagaactacttgggctacttagggatcaagatcgataaagaagccaatgatttcaaaggtgaggagaagatcatttcaacgcccgattccaaagtgattgcgatggtaattccgaccaacgaggagctcatgatcgccaaagacacgaaagaaatcattgagaaagggttggacgagcttaagatc

SEQ ID NO: 384 - protein, 417 aa, synthetic construct
  REGION 1..417: note = Variant of acetate kinase
MHHHHHHGGSGMKVLVINSGSSSIKYQLLDMTNEKVLAKGLVERIGIDGSRIVHKVNGEKHVLEHEIKDHEIGLKLVLDLLTDEKYGVLKDLKEIDAVGHRVVHGGERFASSVKITDEVLKTIETLSFLAPLHNPLNIMGIKSSMKLMPGVPQVAVFDTAFHQKMPEKAYLYAIPYEYYEKYKIRRYGFHGTSHRYVSKRAAEIMGKPYDQLKIITVHVGNGASVAAVKNGVSVDTSMGFTPLEGLVMGTRSGDIDPAIVEFLEKEEGLSAKEVVNILNKKSGVYGLTKGFSSDMRDIEDNAIEGDPVCRLAFDVYEYRIAKYIGAYAAAMNGVDAIVFTAGVGENSPIMREEIIENYLGYLGIKIDKEANDFKGEEKIISTPDSKVIAMVIPTNEELMIAKDTKEIIEKGLDELKI

SEQ ID NO: 385 - DNA, 1251 bp, synthetic construct
  misc_feature 1..1251: note = Variant of acetate kinase
  source 1..1251: mol_type = other DNA
atgcaccatcatcatcatcatggcggtagcggcatgaaagttctggtgattaattctggtagctcctccatcaaatatcagctcctcgatatgaccaacgaaaaggtattagcgaaaggcttggtcgagcgcattggcatcgacggttcgcgtatcgtgcataaagttaacggcgaaaaacacgtgctggaacatgagattccgaatcacgaaattggacttaaattggtcctggatcttcttacggacgaaaaatacggtgtgttgaaggatctcaaagaaatcgatgcagttgggcatcgcgtagtacatggcggcgagcgttttgccagtagcgtgaagattactgacgaagtcttaaagaccatcgagacgttgtcgttcttagctccgttacacaatccagcgaacattatgggtatcaagagcagcatgaaattattaccgggtgtgcctcaagttgccgtctttgatacagcgttccaccagaagatgccggagaaagcctatttgtacgcaatcccctatgagtactacgagaaatataaaattcgccgctatgggtttcatggaacctcacatcgttatgtgagtaaacgtgctgcggaaattatgggcaaaccgtacgatcagctcaagatcattaccgttcacgtgggtaacggcgcatcagttgcggcggtgaagaatggcgtatctgttgacacttccatgggtttcacaccacttgaaggtcttgtcatgggcacgcgcagcggcgatattgatccggccatcgtggaatttcttgagaaagaagaaggattgtcggccaaagaagtcgtcaacatcctcaacaagaaatctggtgtgtatgggctcaccaaaggctttagtagtgacatgcgtgacattgaagataatgctattgaaggtgatcctgtatgccgccttgcatttgatgtgtacgaatatcgtatcgcgaaatatattggcgcatacgctgcggccatgaacggtgttgacgcgatcgtctttaccgcaggagttggcgaaaatagcccgattatgcgccatgaaattattgagaactacttgggctacttagggatcaagatcgataaagaagccaatgacgttaaaggtgaggagaagatcatttcaacgcccgattccaaagtgattgcgatggtagttccgaccaacgaggagctcatgatcgccaaagacacgaaagaaatcgttgagaaagggttggacgagcttaagatc

SEQ ID NO: 386 - protein, 417 aa, synthetic construct
  REGION 1..417: note = Variant of acetate kinase
MHHHHHHGGSGMKVLVINSGSSSIKYQLLDMTNEKVLAKGLVERIGIDGSRIVHKVNGEKHVLEHEIPNHEIGLKLVLDLLTDEKYGVLKDLKEIDAVGHRVVHGGERFASSVKITDEVLKTIETLSFLAPLHNPANIMGIKSSMKLLPGVPQVAVFDTAFHQKMPEKAYLYAIPYEYYEKYKIRRYGFHGTSHRYVSKRAAEIMGKPYDQLKIITVHVGNGASVAAVKNGVSVDTSMGFTPLEGLVMGTRSGDIDPAIVEFLEKEEGLSAKEVVNILNKKSGVYGLTKGFSSDMRDIEDNAIEGDPVCRLAFDVYEYRIAKYIGAYAAAMNGVDAIVFTAGVGENSPIMRHEIIENYLGYLGIKIDKEANDVKGEEKIISTPDSKVIAMVVPTNEELMIAKDTKEIVEKGLDELKI

SEQ ID NO: 387 - DNA, 1251 bp, synthetic construct
  misc_feature 1..1251: note = Variant of acetate kinase
  source 1..1251: mol_type = other DNA
atgcaccatcatcatcatcatggcggtagcggcatgaaagttctggtgattaattctggtagctcctccatcaaatatcagctcctcgatatgaccaacgaaaaggtattagcgaaaggcttggtcgagcgcattggcatcgacggttcgcgtatcgtgcataaagttaacggcgaaaaacacgtgctggaacatgagattccgaatcacgaaattggacttaaattggtcctggatcttcttacggacgaaaaatacggtgtgttgaaggatctcaaagaaatcgatgcagttgggcatcgcgtagtacatggcggcgagcgttttgccagtagcgtgaagattactgacgaagtcttaaagaccatcgagacgttgtcgttcttagctccgttacacaatccagcgaacattatgggtatcaagagcagcatgaaattattaccgggtgtgcctcaagttgccgtctttgatacagcgttccaccagaagatgccggagaaagcctatttgtacgcaatcccctatgagtactacgagaaatataaaattcgccgctatgggtttcatggaacctcacatcgttatgtgagtaaacgtgctgcggaaattatgggcaaaccgtacgatcagctcaagatcattaccgttcacgtgggtaacggcgcatcagttgcggcggtgaagaatggcgtatctgttgacacttccatgggtttcacaccacttgaaggtcttgtcatgggcacgcgcagcggcgatattgatccggccatcgtggaatttcttgagaaagaagaaggattgtcggccaaagaagtcgtcaacatcctcaacaagaaatctggtgtgtatgggctcaccaaaggctttagtagtgacatgcgtgacattgaagataatgctattgaaggtgatcctgtatgccgccttgcatttgatgtgtacgaatatcgtatcgcgaaatatattggcgcatacgctgcggccatgaacggtgttgacgcgatcgtctttaccgcaggagttggcgaaaatagcccgattatgcgccatgaaattattgagaactacttgggctacttagggatcaagatcgataaagaagccaatgacttcaaaggtgaggagaagatcatttcaacgcccgattccaaagtgattgcgatggtagttccgaccaacgaggagctcatgatcgccaaagacacgaaagaaatcattgagaaagggttggacgagcttaagatc

SEQ ID NO: 388 - protein, 417 aa, synthetic construct
  REGION 1..417: note = Variant of acetate kinase
MHHHHHHGGSGMKVLVINSGSSSIKYQLLDMTNEKVLAKGLVERIGIDGSRIVHKVNGEKHVLEHEIPNHEIGLKLVLDLLTDEKYGVLKDLKEIDAVGHRVVHGGERFASSVKITDEVLKTIETLSFLAPLHNPANIMGIKSSMKLLPGVPQVAVFDTAFHQKMPEKAYLYAIPYEYYEKYKIRRYGFHGTSHRYVSKRAAEIMGKPYDQLKIITVHVGNGASVAAVKNGVSVDTSMGFTPLEGLVMGTRSGDIDPAIVEFLEKEEGLSAKEVVNILNKKSGVYGLTKGFSSDMRDIEDNAIEGDPVCRLAFDVYEYRIAKYIGAYAAAMNGVDAIVFTAGVGENSPIMRHEIIENYLGYLGIKIDKEANDFKGEEKIISTPDSKVIAMVVPTNEELMIAKDTKEIIEKGLDELKI

SEQ ID NO: 389 - DNA, 1251 bp, synthetic construct
  misc_feature 1..1251: note = Variant of acetate kinase
  source 1..1251: mol_type = other DNA
atgcaccatcatcatcatcatggcggtagcggcatgaaagttctggtgattaattctggtagctcctccatcaaatatcagctcctcgatatgaccaacgaaaaggtattagcgaaaggcttggtcgagcgcattggcatcgacggttcgcgtcttgtgcataaagttaacggcgaaaaacacgtgctggaacatgagattaagaatcacgaaattggacttaaattggtcctggatcttcttacggacgaaaaatacggtgtgttgaaggatctcaaagaaatcgatgcagttgggcatcgcgtagtacatggcggcgagcgttttgccagtagcgtgaagattactgacgaagtcttaaagaccatcgagacgttgtcgttcttagctccgttacacaatccagcgaacattatgggtatcaagagcagcatgaaattattaccgggtgtgcctcaagttgccgtctttgatacagcgttccaccagaagatgccggagaaagcctatttgtacgcaatcccctatgagtactacgagaaatataaaattcgccgctatgggtttcatggaacctcacatcgttatgtgagtaaacgtgctgcggaaattatgggcaaaccgtacgatcagctcaagatcattaccgttcacgtgggtaacggcgcatcagttgcggcggtgaagaatggcgtatctgttgacacttccatgggtttcacaccacttgaaggtcttgtcatgggcacgcgcagcggcgatattgatccggccatcgtggaatttcttgagaaagaagaaggattgtcggccaaagaagtcgtcaacatcctcaacaagaaatctggtgtgtatgggctcaccaaaggctttagtagtgacatgcgtgacattgaagataatgctattgaaggtgatcctgtatgccgccttgcattcgatgtgtacgaatatcgtatcgcgaaatatattggcgcatacgctgcggccatgaacggtgttgacgcgatcgtctttaccgcaggagttggcgaaaatagcccgattatgcgcgaagaaattattgagaactacttgggctacttagggatcaagatcgataaagaagccaatgatttcaaaggtgaggagaagatcatttcaacgcccgattccaaagtgattgcgatggtaattccgaccaacgaggagctcatgatcgccaaagacacgaaagaaatcattgagaaagggttggacgagcttaagatc

SEQ ID NO: 390 - protein, 417 aa, synthetic construct
  REGION 1..417: note = Variant of acetate kinase
MHHHHHHGGSGMKVLVINSGSSSIKYQLLDMTNEKVLAKGLVERIGIDGSRLVHKVNGEKHVLEHEIKNHEIGLKLVLDLLTDEKYGVLKDLKEIDAVGHRVVHGGERFASSVKITDEVLKTIETLSFLAPLHNPANIMGIKSSMKLLPGVPQVAVFDTAFHQKMPEKAYLYAIPYEYYEKYKIRRYGFHGTSHRYVSKRAAEIMGKPYDQLKIITVHVGNGASVAAVKNGVSVDTSMGFTPLEGLVMGTRSGDIDPAIVEFLEKEEGLSAKEVVNILNKKSGVYGLTKGFSSDMRDIEDNAIEGDPVCRLAFDVYEYRIAKYIGAYAAAMNGVDAIVFTAGVGENSPIMREEIIENYLGYLGIKIDKEANDFKGEEKIISTPDSKVIAMVIPTNEELMIAKDTKEIIEKGLDELKI

SEQ ID NO: 391 - DNA, 1251 bp, synthetic construct
  misc_feature 1..1251: note = Variant of acetate kinase
  source 1..1251: mol_type = other DNA
atgcaccatcatcatcatcatggcggtagcggcatgaaagttctggtgattaattctggtagctcctccatcaaatatcagctcctcgatatgaccaacgaaaaggtattagcgaaaggcttggtcgagcgcattggcatcgacggttcgcgtatcgtgcataaagttaacggcgaaaaacacgtgctggaacatgagattaaaaatcacgaaattggacttaaattggtcctggatcttcttacggacgaaaaatacggtgtgttgaaggatctcaaagaaatcgatgcagttgggcatcgcgtagtacatggcggcgagcgttttgccagtagcgtgaagattactgacgaagtcttaaagaccatcgagacgttgtcgttcttagctccgttacacaatccagtgaacattatgggtatcaagagcagcatgaaagtgttaccgggtgtgcctcaagttgccgtctttgatacagcgttccaccagaagatgccggagaaagcctatttgtacgcaatcccctatgagtactacgagaaatataaaattcgccgctatgggtttcatggaacctcacatcgttatgtgagtaaacgtgctgcggaaattctgggcaaaccgtacgatcagctcaagatcattaccgttcacgtgggtaacggcgcatcagttgcggcggtgaagaatggcgtatctgttgacacttccatgggtttcacaccacttgaaggtcttgtcatgggcacgcgcagcggcgatattgatccggccatcgtggaatttcttgagaaagaagaaggattgtcggccaaagaagtcgtcaacatcctcaacaagaaatctggtgtgtatgggctcaccaaaggctttagtagtgacatgcgtgacattgaagataatgctattgaaggtgatcctgtatgccgccttgcatttgatgtgtacgaatatcgtatcgcgaaatatattggcgcatacgctgcggccatgaacggtgttgacgcgatcgtctttaccgcaggagttggcgaaaatagcccgattatgcgcgaagaaattattgagaactacttgggctacttagggatcaagatcgataaagaagccaatgacgttaaaggtgaggagaagatcatttcaacgcccgattccaaagtgattgcgatggtagttccgaccaacgaggagctcatgatcgccaaagacacgaaagaaatcgttgagaaagggttggacgagcttaagatc

SEQ ID NO: 392 - protein, 417 aa, synthetic construct
  REGION 1..417: note = Variant of acetate kinase
MHHHHHHGGSGMKVLVINSGSSSIKYQLLDMTNEKVLAKGLVERIGIDGSRIVHKVNGEKHVLEHEIKNHEIGLKLVLDLLTDEKYGVLKDLKEIDAVGHRVVHGGERFASSVKITDEVLKTIETLSFLAPLHNPVNIMGIKSSMKVLPGVPQVAVFDTAFHQKMPEKAYLYAIPYEYYEKYKIRRYGFHGTSHRYVSKRAAEILGKPYDQLKIITVHVGNGASVAAVKNGVSVDTSMGFTPLEGLVMGTRSGDIDPAIVEFLEKEEGLSAKEVVNILNKKSGVYGLTKGFSSDMRDIEDNAIEGDPVCRLAFDVYEYRIAKYIGAYAAAMNGVDAIVFTAGVGENSPIMREEIIENYLGYLGIKIDKEANDVKGEEKIISTPDSKVIAMVVPTNEELMIAKDTKEIVEKGLDELKI

SEQ ID NO: 393 - DNA, 1251 bp, synthetic construct
  misc_feature 1..1251: note = Variant of acetate kinase
  source 1..1251: mol_type = other DNA
atgcaccatcatcatcatcatggcggtagcggcatgaaagttctggtgattaattctggtagctcctccatcaaatatcagctcctcgatatgaccaacgaaaaggtattagcgaaaggcttggtcgagcgcattggcatcgacggttcgcgtatcgtgcataaagttaacggcgaaaaacacgtgctggaacatgagattaagaatcacgaaattggacttaaattggtcctggatcttcttacggacgaaaaatacggtgtgttgaaggatctcaaagaaatcgatgcagttgggcatcgcgtagtacatggcggcgagcgttttgccagtagcgtgaagattactgacgaagtcttaaagaccatcgagacgttgtcgttcttagctccgttacacaatccagcgaacattatgggtatcaagagcagcatgaaattattaccgggtgtgcctcaagttgccgtctttgatacagcgttccaccagaagatgccggagaaagcctatttgtacgcaatcccctatgagtactacgagaaatataaaattcgccgctatgggtttcatggaacctcacatcgttatgtgagtaaacgtgctgcggaaattctgggcaaaccgtacgatcagctcaagatcattaccgttcacgtgggtaacggcgcatcagttgcggcggtgaagaatggcgtatctgttgacacttccatgggtttcacaccacttgaaggtcttgtcatgggcacgcgcagcggcgatattgatccggccatcgtggaatttcttgagaaagaagaaggattgtcggccaaagaagtcgtcaacatcctcaacaagaaatctggtgtgtatgggctcaccaaaggctttagtagtgacatgcgtgacattgaagataatgctattgaaggtgatcctgtatgccgccttgcatttgatgtgtacgaatatcgtatcgcgaaatatattggcgcatacgctgcggccatgaacggtgttgacgcgatcgtctttaccgcaggagttggcgaaaatagcccgattatgcgccatgaaattattgagaactacttgggctacttagggatcaagatcgataaagaagccaatgacttcaaaggtgaggagaagatcatttcaacgcccgattccaaagtgattgcgatggtagttccgaccaacgaggagctcatgatcgccaaagacacgaaagaaatcattgagaaagggttggacgagcttaagatc

SEQ ID NO: 394 - protein, 417 aa, synthetic construct
  REGION 1..417: note = Variant of acetate kinase
MHHHHHHGGSGMKVLVINSGSSSIKYQLLDMTNEKVLAKGLVERIGIDGSRIVHKVNGEKHVLEHEIKNHEIGLKLVLDLLTDEKYGVLKDLKEIDAVGHRVVHGGERFASSVKITDEVLKTIETLSFLAPLHNPANIMGIKSSMKLLPGVPQVAVFDTAFHQKMPEKAYLYAIPYEYYEKYKIRRYGFHGTSHRYVSKRAAEILGKPYDQLKIITVHVGNGASVAAVKNGVSVDTSMGFTPLEGLVMGTRSGDIDPAIVEFLEKEEGLSAKEVVNILNKKSGVYGLTKGFSSDMRDIEDNAIEGDPVCRLAFDVYEYRIAKYIGAYAAAMNGVDAIVFTAGVGENSPIMRHEIIENYLGYLGIKIDKEANDFKGEEKIISTPDSKVIAMVVPTNEELMIAKDTKEIIEKGLDELKI

SEQ ID NO: 395 - DNA, 1251 bp, synthetic construct
  misc_feature 1..1251: note = Variant of acetate kinase
  source 1..1251: mol_type = other DNA
atgcaccatcatcatcatcatggcggtagcggcatgaaagttctggtgattaattctggtagctcctccatcaaatatcagctcctcgatatgaccaacgaaaaggtattagcgaaaggcttggtcgagcgcattggcatcgacggttcgcgtatcgtgcataaagttaacggcgaaaaacacgtgctggaacatgagattaagaatcacgaaattggacttaaattggtcctggatcttcttacggacgaaaaatacggtgtgttgaaggatctcaaagaaatcgatgcagttgggcatcgcgtagtacatggcggcgagcgttttgccagtagcgtgaagattactgacgaagtcttaaagaccatcgagacgttgtcgttcttagctccgttacacaatccagcgaacattatgggtatcaagagcagcatgaaagtgttaccgggtgtgcctcaagttgccgtctttgatacagcgttccaccagaagatgccggagaaagcctatttgtacgcaatcccctatgagtactacgagaaatataaaattcgccgctatgggtttcatggaacctcacatcgttatgtgagtaaacgtgctgcggaaattatgggcaaaccgtacgatcagctcaagatcattaccgttcacgtgggtaacggcgcatcagttgcggcggtgaagaatggcgtatctgttgacacttccatgggtttcacaccacttgaaggtcttgtcatgggcacgcgcagcggcgatattgatccggccatcgtggaatttcttgagaaagaagaaggattgtcggccaaagaagtcgtcaacatcctcaacaagaaatctggtgtgtatgggctcaccaaaggctttagtagtgacatgcgtgacattgtggataatgctattgaaggtgatcctgtatgccgccttgcattagatgtgtacgaatatcgtatcgcgaaatatattggcgcatacgctgcggccatgaacggtgttgacgcgatcgtctttaccgcaggagttggcgaaaatagcccgattatgcgcgaagaaattattgagaactacttgggctacttagggatcaagatcgataaagaagccaatgacttcaaaggtgaggagaagatcatttcaacgcccgattccaaagtgattgcgatggtagttccgaccaacgaggagctcatgatcgccaaagacacgaaagaaatcattgagaaagggttggacgagcttaagatc

SEQ ID NO: 396 - protein, 417 aa, synthetic construct
  REGION 1..417: note = Variant of acetate kinase
MHHHHHHGGSGMKVLVINSGSSSIKYQLLDMTNEKVLAKGLVERIGIDGSRIVHKVNGEKHVLEHEIKNHEIGLKLVLDLLTDEKYGVLKDLKEIDAVGHRVVHGGERFASSVKITDEVLKTIETLSFLAPLHNPANIMGIKSSMKVLPGVPQVAVFDTAFHQKMPEKAYLYAIPYEYYEKYKIRRYGFHGTSHRYVSKRAAEIMGKPYDQLKIITVHVGNGASVAAVKNGVSVDTSMGFTPLEGLVMGTRSGDIDPAIVEFLEKEEGLSAKEVVNILNKKSGVYGLTKGFSSDMRDIVDNAIEGDPVCRLALDVYEYRIAKYIGAYAAAMNGVDAIVFTAGVGENSPIMREEIIENYLGYLGIKIDKEANDFKGEEKIISTPDSKVIAMVVPTNEELMIAKDTKEIIEKGLDELKI

SEQ ID NO: 397 - DNA, 1251 bp, synthetic construct
  misc_feature 1..1251: note = Variant of acetate kinase
  source 1..1251: mol_type = other DNA
atgcaccatcatcatcatcatggcggtagcggcatgaaagttctggtgattaattctggtagctcctccatcaaatatcagctcctcgatatgaccaacgaaaaggtattagcgaaaggcttggtcgagcgcattggcatcgacggttcgcgtatcgtgcataaagttaacggcgaaaaacacgtgctggaacatgagattaagaatcacgaaattggacttaaattggtcctggatcttcttacggacgaaaaatacggtgtgttgaaggatctcaaagaaatcgatgcagttgggcatcgcgtagtacatggcggcgagcgttttgccagtagcgtgaagattactgacgaagtcttaaagaccatcgagacgttgtcgttcttagctccgttacacaatccagcgaacattatgggtatcaagagcagcatgaaagtgttaccgggtgtgcctcaagttgccgtctttgatacagcgttccaccagaagatgccggagaaagcctatttgtacgcaatcccctatgagtactacgagaaatataaaattcgccgctatgggtttcatggaacctcacatcgttatgtgagtaaacgtgctgcggaaattatgggcaaaccgtacgatcagctcaagatcattaccgttcacgtgggtaacggcgcatcagttgcggcggtgaagaatggcgtatctgttgacacttccatgggtttcacaccacttgaaggtcttgtcatgggcacgcgcagcggcgatattgatccggccatcgtggaatttcttgagaaagaagaaggattgtcggccaaagaagtcgtcaacatcctcaacaagaaatctggtgtgtatgggctcaccaaaggctttagtagtgacatgcgtgacatttttgataatgctattgaaggtgatcctgtatgccgccttgcattagatgtgtacgaatatcgtatcgcgaaatatattggcgcatacgctgcggccatgaacggtgttgacgcgatcgtctttaccgcaggagttggcgaaaatagcccgattatgcgcgaagaaattattgagaactacttgggctacttagggatcaagatcgataaagaagccaatgacttcaaaggtgaggagaagatcatttcaacgcccgattccaaagtgattgcgatggtagttccgaccaacgaggagctcatgatcgccaaagacacgaaagaaatcattgagaaagggttggacgagcttaagatc

SEQ ID NO: 398 - protein, 417 aa, synthetic construct
  REGION 1..417: note = Variant of acetate kinase
MHHHHHHGGSGMKVLVINSGSSSIKYQLLDMTNEKVLAKGLVERIGIDGSRIVHKVNGEKHVLEHEIKNHEIGLKLVLDLLTDEKYGVLKDLKEIDAVGHRVVHGGERFASSVKITDEVLKTIETLSFLAPLHNPANIMGIKSSMKVLPGVPQVAVFDTAFHQKMPEKAYLYAIPYEYYEKYKIRRYGFHGTSHRYVSKRAAEIMGKPYDQLKIITVHVGNGASVAAVKNGVSVDTSMGFTPLEGLVMGTRSGDIDPAIVEFLEKEEGLSAKEVVNILNKKSGVYGLTKGFSSDMRDIFDNAIEGDPVCRLALDVYEYRIAKYIGAYAAAMNGVDAIVFTAGVGENSPIMREEIIENYLGYLGIKIDKEANDFKGEEKIISTPDSKVIAMVVPTNEELMIAKDTKEIIEKGLDELKI

SEQ ID NO: 399 - DNA, 1251 bp, synthetic construct
  misc_feature 1..1251: note = Variant of acetate kinase
  source 1..1251: mol_type = other DNA
atgcaccatcatcatcatcatggcggtagcggcatgaaagttctggtgattaattctggtagctcctccatcaaatatcagctcctcgatatgaccaacgaaaaggtattagcgaaaggcttggtcgagcgcattggcatcgacggttcgcgtatcgtgcataaagttaacggcgaaaaacacgtgctggaacatgagattaagaatcacgaaattggacttaaattggtcctggatcttcttacggacgaaaaatacggtgtgttgaaggatctcaaagaaatcgatgcagttgggcatcgcgtagtacatggcggcgagcgttttgccagtagcgtgaagattactgacgaagtcttaaagaccatcgagacgttgtcgttcttagctccgttacacaatccagcgaacattatgggtatcaagagcagcatgaaagtgttaccgggtgtgcctcaagttgccgtctttgatacagcgttccaccagaagatgccggagaaagcctatttgtacgcaatcccctatgagtactacgagaaatataaaattcgccgctatgggtttcatggaacctcacatcgttatgtgagtaaacgtgctgcggaaattatgggcaaaccgtacgatcagctcaagatcattaccgttcacgtgggtaacggcgcatcagttgcggcggtgaagaatggcgtatctgttgacacttccatgggtttcacaccacttgaaggtcttgtcatgggcacgcgcagcggcgatattgatccggccatcgtggaatttcttgagaaagaagaaggattgtcggccaaagaagtcgtcaacatcctcaacaagaaatctggtgtgtatgggctcaccaaaggctttagtagtgacatgcgtgacattcttgataatgctattgaaggtgatcctgtatgccgccttgcattagatgtgtacgaatatcgtatcgcgaaatatattggcgcatacgctgcggccatgaacggtgttgacgcgatcgtctttaccgcaggagttggcgaaaatagcccgattatgcgcgaagaaattattgagaactacttgggctacttagggatcaagatcgataaagaagccaatgacttcaaaggtgaggagaagatcatttcaacgcccgattccaaagtgattgcgatggtagttccgaccaacgaggagctcatgatcgccaaagacacgaaagaaatcattgagaaagggttggacgagcttaagatc

SEQ ID NO: 400 - protein, 417 aa, synthetic construct
  REGION 1..417: note = Variant of acetate kinase
MHHHHHHGGSGMKVLVINSGSSSIKYQLLDMTNEKVLAKGLVERIGIDGSRIVHKVNGEKHVLEHEIKNHEIGLKLVLDLLTDEKYGVLKDLKEIDAVGHRVVHGGERFASSVKITDEVLKTIETLSFLAPLHNPANIMGIKSSMKVLPGVPQVAVFDTAFHQKMPEKAYLYAIPYEYYEKYKIRRYGFHGTSHRYVSKRAAEIMGKPYDQLKIITVHVGNGASVAAVKNGVSVDTSMGFTPLEGLVMGTRSGDIDPAIVEFLEKEEGLSAKEVVNILNKKSGVYGLTKGFSSDMRDILDNAIEGDPVCRLALDVYEYRIAKYIGAYAAAMNGVDAIVFTAGVGENSPIMREEIIENYLGYLGIKIDKEANDFKGEEKIISTPDSKVIAMVVPTNEELMIAKDTKEIIEKGLDELKI

SEQ ID NO: 401 - DNA, 1251 bp, synthetic construct
  misc_feature 1..1251: note = Variant of acetate kinase
  source 1..1251: mol_type = other DNA
atgcaccatcatcatcatcatggcggtagcggcatgaaagttctggtgattaattctggtagctcctccatcaaatatcagctcctcgatatgaccaacgaaaaggtattagcgaaaggcttggtcgagcgcattggcatcgacggttcgcgtatcgtgcataaagttaacggcgaaaaacacgtgctggaacatgagattaagaatcacgaaattggacttaaattggtcctggatcttcttacggacgaaaaatacggtgtgttgaaggatctcaaagaaatcgatgcagttgggcatcgcgtagtacatggcggcgagcgttttgccagtagcgtgaagattactgacgaagtcttaaagaccatcgagacgttgtcgttcttagctccgttacacaatccagcgaacattatgggtatcaagagcagcatgaaagtgttaccgggtgtgcctcaagttgccgtctttgatacagcgttccaccagaagatgccggagaaagcctatttgtacgcaatcccctatgagtactacgagaaatataaaattcgccgctatgggtttcatggaacctcacatcgttatgtgagtaaacgtgctgcggaaattatgggcaaaccgtacgatcagctcaagatcattaccgttcacgtgggtaacggcgcatcagttgcggcggtgaagaatggcgtatctgttgacacttccatgggtttcacaccacttgaaggtcttgtcatgggcacgcgcagcggcgatattgatccggccatcgtggaatttcttgagaaagaagaaggattgtcggccaaagaagtcgtcaacatcctcaacaagaaatctggtgtgtatgggctcaccaaaggctttagtagtgacatgcgtgacattacggataatgctattgaaggtgatcctgtatgccgccttgcattagatgtgtacgaatatcgtatcgcgaaatatattggcgcatacgctgcggccatgaacggtgttgacgcgatcgtctttaccgcaggagttggcgaaaatagcccgattatgcgcgaagaaattattgagaactacttgggctacttagggatcaagatcgataaagaagccaatgacttcaaaggtgaggagaagatcatttcaacgcccgattccaaagtgattgcgatggtagttccgaccaacgaggagctcatgatcgccaaagacacgaaagaaatcattgagaaagggttggacgagcttaagatc

SEQ ID NO: 402 - protein, 417 aa, synthetic construct
  REGION 1..417: note = Variant of acetate kinase
MHHHHHHGGSGMKVLVINSGSSSIKYQLLDMTNEKVLAKGLVERIGIDGSRIVHKVNGEKHVLEHEIKNHEIGLKLVLDLLTDEKYGVLKDLKEIDAVGHRVVHGGERFASSVKITDEVLKTIETLSFLAPLHNPANIMGIKSSMKVLPGVPQVAVFDTAFHQKMPEKAYLYAIPYEYYEKYKIRRYGFHGTSHRYVSKRAAEIMGKPYDQLKIITVHVGNGASVAAVKNGVSVDTSMGFTPLEGLVMGTRSGDIDPAIVEFLEKEEGLSAKEVVNILNKKSGVYGLTKGFSSDMRDITDNAIEGDPVCRLALDVYEYRIAKYIGAYAAAMNGVDAIVFTAGVGENSPIMREEIIENYLGYLGIKIDKEANDFKGEEKIISTPDSKVIAMVVPTNEELMIAKDTKEIIEKGLDELKI

SEQ ID NO: 403 - DNA, 1251 bp, synthetic construct
  misc_feature 1..1251: note = Variant of acetate kinase
  source 1..1251: mol_type = other DNA
atgcaccatcatcatcatcatggcggtagcggcatgaaagttctggtgattaattctggtagctcctccatcaaatatcagctcctcgatatgaccaacgaaaaggtattagcgaaaggcttggtcgagcgcattggcatcgacggttcgcgtatcgtgcataaagttaacggcgaaaaacacgtgctggaacatgagattaagaatcacgaaattggacttaaattggtcctggatcttcttacggacgaaaaatacggtgtgttgaaggatctcaaagaaatcgatgcagttgggcatcgcgtagtacatggcggcgagcgttttgccagtagcgtgaagattactgacgaagtcttaaagaccatcgagacgttgtcgttcttagctccgttacacaatccagcgaacattatgggtatcaagagcagcatgaaagtgttaccgggtgtgcctcaagttgccgtctttgatacagcgttccaccagaagatgccggagaaagcctatttgtacgcaatcccctatgagtactacgagaaatataaaattcgccgctatgggtttcatggaacctcacatcgttatgtgagtaaacgtgctgcggaaattatgggcaaaccgtacgatcagctcaagatcattaccgttcacgtgggtaacggcgcatcagttgcggcggtgaagaatggcgtatctgttgacacttccatgggtttcacaccacttgaaggtcttgtcatgggcacgcgcagcggcgatattgatccggccatcgtggaatttcttgagaaagaagaaggattgtcggccaaagaagtcgtcaacatcctcaacaagaaatctggtgtgtatgggctcaccaaaggctttagtagtgacatgcgtgacattatggataatgctattgaaggtgatcctgtatgccgccttgcattagatgtgtacgaatatcgtatcgcgaaatatattggcgcatacgctgcggccatgaacggtgttgacgcgatcgtctttaccgcaggagttggcgaaaatagcccgattatgcgcgaagaaattattgagaactacttgggctacttagggatcaagatcgataaagaagccaatgacttcaaaggtgaggagaagatcatttcaacgcccgattccaaagtgattgcgatggtagttccgaccaacgaggagctcatgatcgccaaagacacgaaagaaatcattgagaaagggttggacgagcttaagatc

SEQ ID NO: 404 - protein, 417 aa, synthetic construct
  REGION 1..417: note = Variant of acetate kinase
MHHHHHHGGSGMKVLVINSGSSSIKYQLLDMTNEKVLAKGLVERIGIDGSRIVHKVNGEKHVLEHEIKNHEIGLKLVLDLLTDEKYGVLKDLKEIDAVGHRVVHGGERFASSVKITDEVLKTIETLSFLAPLHNPANIMGIKSSMKVLPGVPQVAVFDTAFHQKMPEKAYLYAIPYEYYEKYKIRRYGFHGTSHRYVSKRAAEIMGKPYDQLKIITVHVGNGASVAAVKNGVSVDTSMGFTPLEGLVMGTRSGDIDPAIVEFLEKEEGLSAKEVVNILNKKSGVYGLTKGFSSDMRDIMDNAIEGDPVCRLALDVYEYRIAKYIGAYAAAMNGVDAIVFTAGVGENSPIMREEIIENYLGYLGIKIDKEANDFKGEEKIISTPDSKVIAMVVPTNEELMIAKDTKEIIEKGLDELKI

SEQ ID NO: 405 - DNA, 1251 bp, synthetic construct
  misc_feature 1..1251: note = Variant of acetate kinase
  source 1..1251: mol_type = other DNA
atgcaccatcatcatcatcatggcggtagcggcatgaaagttctggtgattaattctggtagctcctccatcaaatatcagctcctcgatatgaccaacgaaaaggtattagcgaaaggcttggtcgagcgcattggcatcgacggttcgcgtatcgtgcataaagttaacggcgaaaaacacgtgctggaacatgagattaagaatcacgaaattggacttaaattggtcctggatcttcttacggacgaaaaatacggtgtgttgaaggatctcaaagaaatcgatgcagttgggcatcgcgtagtacatggcggcgagcgttttgccagtagcgtgaagattactgacgaagtcttaaagaccatcgagacgttgtcgttcttagctccgttacacaatccagcgaacattatgggtatcaagagcagcatgaaagtgttaccgggtgtgcctcaagttgccgtctttgatacagcgttccaccagaagatgccggagaaagcctatttgtacgcaatcccctatgagtactacgagaaatataaaattcgccgctatgggtttcatggaacctcacatcgttatgtgagtaaacgtgctgcggaaattatgggcaaaccgtacgatcagctcaagatcattaccgttcacgtgggtaacggcgcatcagttgcggcggtgaagaatggcgtatctgttgacacttccatgggtttcacaccacttgaaggtcttgtcatgggcacgcgcagcggcgatattgatccggccatcgtggaatttcttgagaaagaagaaggattgtcggccaaagaagtcgtcaacatcctcaacaagaaatctggtgtgtatgggctcaccaaaggctttagtagtgacatgcgtgacatttctgataatgctattgaaggtgatcctgtatgccgccttgcattagatgtgtacgaatatcgtatcgcgaaatatattggcgcatacgctgcggccatgaacggtgttgacgcgatcgtctttaccgcaggagttggcgaaaatagcccgattatgcgcgaagaaattattgagaactacttgggctacttagggatcaagatcgataaagaagccaatgacttcaaaggtgaggagaagatcatttcaacgcccgattccaaagtgattgcgatggtagttccgaccaacgaggagctcatgatcgccaaagacacgaaagaaatcattgagaaagggttggacgagcttaagatc

SEQ ID NO: 406 - protein, 417 aa, synthetic construct
  REGION 1..417: note = Variant of acetate kinase
MHHHHHHGGSGMKVLVINSGSSSIKYQLLDMTNEKVLAKGLVERIGIDGSRIVHKVNGEKHVLEHEIKNHEIGLKLVLDLLTDEKYGVLKDLKEIDAVGHRVVHGGERFASSVKITDEVLKTIETLSFLAPLHNPANIMGIKSSMKVLPGVPQVAVFDTAFHQKMPEKAYLYAIPYEYYEKYKIRRYGFHGTSHRYVSKRAAEIMGKPYDQLKIITVHVGNGASVAAVKNGVSVDTSMGFTPLEGLVMGTRSGDIDPAIVEFLEKEEGLSAKEVVNILNKKSGVYGLTKGFSSDMRDISDNAIEGDPVCRLALDVYEYRIAKYIGAYAAAMNGVDAIVFTAGVGENSPIMREEIIENYLGYLGIKIDKEANDFKGEEKIISTPDSKVIAMVVPTNEELMIAKDTKEIIEKGLDELKI

SEQ ID NO: 407 - DNA, 1251 bp, synthetic construct
  misc_feature 1..1251: note = Variant of acetate kinase
  source 1..1251: mol_type = other DNA
atgcaccatcatcatcatcatggcggtagcggcatgaaagttctggtgattaattctggtagctcctccatcaaatatcagctcctcgatatgaccaacgaaaaggtattagcgaaaggcttggtcgagcgcattggcatcgacggttcgcgtatcgtgcataaagttaacggcgaaaaacacgtgctggaacatgagattaagaatcacgaaattggacttaaattggtcctggatcttcttacggacgaaaaatacggtgtgttgaaggatctcaaagaaatcgatgcagttgggcatcgcgtagtacatggcggcgagcgttttgccagtagcgtgaagattactgacgaagtcttaaagaccatcgagacgttgtcgttcttagctccgttacacaatccagcgaacattatgggtatcaagagcagcatgaaagtgttaccgggtgtgcctcaagttgccgtctttgatacagcgttccaccagaagatgccggagaaagcctatttgtacgcaatcccctatgagtactacgagaaatataaaattcgccgctatgggtttcatggaacctcacatcgttatgtgagtaaacgtgctgcggaaattatgggcaaaccgtacgatcagctcaagatcattaccgttcacgtgggtaacggcgcatcagttgcggcggtgaagaatggcgtatctgttgacacttccatgggtttcacaccacttgaaggtcttgtcatgggcacgcgcagcggcgatattgatccggccatcgtggaatttcttgagaaagaagaaggattgtcggccaaagaagtcgtcaacatcctcaacaagaaatctggtgtgtatgggctcaccaaaggctttagtagtgacatgcgtgacattgaaaggaatgctattgaaggtgatcctgtatgccgccttgcattagatgtgtacgaatatcgtatcgcgaaatatattggcgcatacgctgcggccatgaacggtgttgacgcgatcgtctttaccgcaggagttggcgaaaatagcccgattatgcgcgaagaaattattgagaactacttgggctacttagggatcaagatcgataaagaagccaatgacttcaaaggtgaggagaagatcatttcaacgcccgattccaaagtgattgcgatggtagttccgaccaacgaggagctcatgatcgccaaagacacgaaagaaatcattgagaaagggttggacgagcttaagatc

SEQ ID NO: 408 - protein, 417 aa, synthetic construct
  REGION 1..417: note = Variant of acetate kinase
MHHHHHHGGSGMKVLVINSGSSSIKYQLLDMTNEKVLAKGLVERIGIDGSRIVHKVNGEKHVLEHEIKNHEIGLKLVLDLLTDEKYGVLKDLKEIDAVGHRVVHGGERFASSVKITDEVLKTIETLSFLAPLHNPANIMGIKSSMKVLPGVPQVAVFDTAFHQKMPEKAYLYAIPYEYYEKYKIRRYGFHGTSHRYVSKRAAEIMGKPYDQLKIITVHVGNGASVAAVKNGVSVDTSMGFTPLEGLVMGTRSGDIDPAIVEFLEKEEGLSAKEVVNILNKKSGVYGLTKGFSSDMRDIERNAIEGDPVCRLALDVYEYRIAKYIGAYAAAMNGVDAIVFTAGVGENSPIMREEIIENYLGYLGIKIDKEANDFKGEEKIISTPDSKVIAMVVPTNEELMIAKDTKEIIEKGLDELKI

SEQ ID NO: 409 - DNA, 1251 bp, synthetic construct
  misc_feature 1..1251: note = Variant of acetate kinase
  source 1..1251: mol_type = other DNA
atgcaccatcatcatcatcatggcggtagcggcatgaaagttctggtgattaattctggtagctcctccatcaaatatcagctcctcgatatgaccaacgaaaaggtattagcgaaaggcttggtcgagcgcattggcatcgacggttcgcgtatcgtgcataaagttaacggcgaaaaacacgtgctggaacatgagattaagaatcacgaaattggacttaaattggtcctggatcttcttacggacgaaaaatacggtgtgttgaaggatctcaaagaaatcgatgcagttgggcatcgcgtagtacatggcggcgagcgttttgccagtagcgtgaagattactgacgaagtcttaaagaccatcgagacgttgtcgttcttagctccgttacacaatccagcgaacattatgggtatcaagagcagcatgaaagtgttaccgggtgtgcctcaagttgccgtctttgatacagcgttccaccagaagatgccggagaaagcctatttgtacgcaatcccctatgagtactacgagaaatataaaattcgccgctatgggtttcatggaacctcacatcgttatgtgagtaaacgtgctgcggaaattatgggcaaaccgtacgatcagctcaagatcattaccgttcacgtgggtaacggcgcatcagttgcggcggtgaagaatggcgtatctgttgacacttccatgggtttcacaccacttgaaggtcttgtcatgggcacgcgcagcggcgatattgatccggccatcgtggaatttcttgagaaagaagaaggattgtcggccaaagaagtcgtcaacatcctcaacaagaaatctggtgtgtatgggctcaccaaaggctttagtagtgacatgcgtgacattgaattgaatgctattgaaggtgatcctgtatgccgccttgcattagatgtgtacgaatatcgtatcgcgaaatatattggcgcatacgctgcggccatgaacggtgttgacgcgatcgtctttaccgcaggagttggcgaaaatagcccgattatgcgcgaagaaattattgagaactacttgggctacttagggatcaagatcgataaagaagccaatgacttcaaaggtgaggagaagatcatttcaacgcccgattccaaagtgattgcgatggtagttccgaccaacgaggagctcatgatcgccaaagacacgaaagaaatcattgagaaagggttggacgagcttaagatc

SEQ ID NO: 410 - protein, 417 aa, synthetic construct
  REGION 1..417: note = Variant of acetate kinase
MHHHHHHGGSGMKVLVINSGSSSIKYQLLDMTNEKVLAKGLVERIGIDGSRIVHKVNGEKHVLEHEIKNHEIGLKLVLDLLTDEKYGVLKDLKEIDAVGHRVVHGGERFASSVKITDEVLKTIETLSFLAPLHNPANIMGIKSSMKVLPGVPQVAVFDTAFHQKMPEKAYLYAIPYEYYEKYKIRRYGFHGTSHRYVSKRAAEIMGKPYDQLKIITVHVGNGASVAAVKNGVSVDTSMGFTPLEGLVMGTRSGDIDPAIVEFLEKEEGLSAKEVVNILNKKSGVYGLTKGFSSDMRDIELNAIEGDPVCRLALDVYEYRIAKYIGAYAAAMNGVDAIVFTAGVGENSPIMREEIIENYLGYLGIKIDKEANDFKGEEKIISTPDSKVIAMVVPTNEELMIAKDTKEIIEKGLDELKI

SEQ ID NO: 411 - DNA, 1251 bp, synthetic construct
  misc_feature 1..1251: note = Variant of acetate kinase
  source 1..1251: mol_type = other DNA
atgcaccatcatcatcatcatggcggtagcggcatgaaagttctggtgattaattctggtagctcctccatcaaatatcagctcctcgatatgaccaacgaaaaggtattagcgaaaggcttggtcgagcgcattggcatcgacggttcgcgtatcgtgcataaagttaacggcgaaaaacacgtgctggaacatgagattaagaatcacgaaattggacttaaattggtcctggatcttcttacggacgaaaaatacggtgtgttgaaggatctcaaagaaatcgatgcagttgggcatcgcgtagtacatggcggcgagcgttttgccagtagcgtgaagattactgacgaagtcttaaagaccatcgagacgttgtcgttcttagctccgttacacaatccagcgaacattatgggtatcaagagcagcatgaaagtgttaccgggtgtgcctcaagttgccgtctttgatacagcgttccaccagaagatgccggagaaagcctatttgtacgcaatcccctatgagtactacgagaaatataaaattcgccgctatgggtttcatggaacctcacatcgttatgtgagtaaacgtgctgcggaaattatgggcaaaccgtacgatcagctcaagatcattaccgttcacgtgggtaacggcgcatcagttgcggcggtgaagaatggcgtatctgttgacacttccatgggtttcacaccacttgaaggtcttgtcatgggcacgcgcagcggcgatattgatccggccatcgtggaatttcttgagaaagaagaaggattgtcggccaaagaagtcgtcaacatcctcaacaagaaatctggtgtgtatgggctcaccaaaggctttagtagtgacatgcgtgacattgaagataatgctaaggaaggtgatcctgtatgccgccttgcattagatgtgtacgaatatcgtatcgcgaaatatattggcgcatacgctgcggccatgaacggtgttgacgcgatcgtctttaccgcaggagttggcgaaaatagcccgattatgcgcgaagaaattattgagaactacttgggctacttagggatcaagatcgataaagaagccaatgacttcaaaggtgaggagaagatcatttcaacgcccgattccaaagtgattgcgatggtagttccgaccaacgaggagctcatgatcgccaaagacacgaaagaaatcattgagaaagggttggacgagcttaagatc

SEQ ID NO: 412 - protein, 417 aa, synthetic construct
  REGION 1..417: note = Variant of acetate kinase
MHHHHHHGGSGMKVLVINSGSSSIKYQLLDMTNEKVLAKGLVERIGIDGSRIVHKVNGEKHVLEHEIKNHEIGLKLVLDLLTDEKYGVLKDLKEIDAVGHRVVHGGERFASSVKITDEVLKTIETLSFLAPLHNPANIMGIKSSMKVLPGVPQVAVFDTAFHQKMPEKAYLYAIPYEYYEKYKIRRYGFHGTSHRYVSKRAAEIMGKPYDQLKIITVHVGNGASVAAVKNGVSVDTSMGFTPLEGLVMGTRSGDIDPAIVEFLEKEEGLSAKEVVNILNKKSGVYGLTKGFSSDMRDIEDNAKEGDPVCRLALDVYEYRIAKYIGAYAAAMNGVDAIVFTAGVGENSPIMREEIIENYLGYLGIKIDKEANDFKGEEKIISTPDSKVIAMVVPTNEELMIAKDTKEIIEKGLDELKI

SEQ ID NO: 413 - DNA, 1251 bp, synthetic construct
  misc_feature 1..1251: note = Variant of acetate kinase
  source 1..1251: mol_type = other DNA
atgcaccatcatcatcatcatggcggtagcggcatgaaagttctggtgattaattctggtagctcctccatcaaatatcagctcctcgatatgaccaacgaaaaggtattagcgaaaggcttggtcgagcgcattggcatcgacggttcgcgtatcgtgcataaagttaacggcgaaaaacacgtgctggaacatgagattaagaatcacgaaattggacttaaattggtcctggatcttcttacggacgaaaaatacggtgtgttgaaggatctcaaagaaatcgatgcagttgggcatcgcgtagtacatggcggcgagcgttttgccagtagcgtgaagattactgacgaagtcttaaagaccatcgagacgttgtcgttcttagctccgttacacaatccagcgaacattatgggtatcaagagcagcatgaaagtgttaccgggtgtgcctcaagttgccgtctttgatacagcgttccaccagaagatgccggagaaagcctatttgtacgcaatcccctatgagtactacgagaaatataaaattcgccgctatgggtttcatggaacctcacatcgttatgtgagtaaacgtgctgcggaaattatgggcaaaccgtacgatcagctcaagatcattaccgttcacgtgggtaacggcgcatcagttgcggcggtgaagaatggcgtatctgttgacacttccatgggtttcacaccacttgaaggtcttgtcatgggcacgcgcagcggcgatattgatccggccatcgtggaatttcttgagaaagaagaaggattgtcggccaaagaagtcgtcaacatcctcaacaagaaatctggtgtgtatgggctcaccaaaggctttagtagtgacatgcgtgacattgaagcgaatgctattgaaggtgatcctgtatgccgccttgcattagatgtgtacgaatatcgtatcgcgaaatatattggcgcatacgctgcggccatgaacggtgttgacgcgatcgtctttaccgcaggagttggcgaaaatagcccgattatgcgcgaagaaattattgagaactacttgggctacttagggatcaagatcgataaagaagccaatgacttcaaaggtgaggagaagatcatttcaacgcccgattccaaagtgattgcgatggtagttccgaccaacgaggagctcatgatcgccaaagacacgaaagaaatcattgagaaagggttggacgagcttaagatc

SEQ ID NO: 414 - protein, 417 aa, synthetic construct
  REGION 1..417: note = Variant of acetate kinase
MHHHHHHGGSGMKVLVINSGSSSIKYQLLDMTNEKVLAKGLVERIGIDGSRIVHKVNGEKHVLEHEIKNHEIGLKLVLDLLTDEKYGVLKDLKEIDAVGHRVVHGGERFASSVKITDEVLKTIETLSFLAPLHNPANIMGIKSSMKVLPGVPQVAVFDTAFHQKMPEKAYLYAIPYEYYEKYKIRRYGFHGTSHRYVSKRAAEIMGKPYDQLKIITVHVGNGASVAAVKNGVSVDTSMGFTPLEGLVMGTRSGDIDPAIVEFLEKEEGLSAKEVVNILNKKSGVYGLTKGFSSDMRDIEANAIEGDPVCRLALDVYEYRIAKYIGAYAAAMNGVDAIVFTAGVGENSPIMREEIIENYLGYLGIKIDKEANDFKGEEKIISTPDSKVIAMVVPTNEELMIAKDTKEIIEKGLDELKI

SEQ ID NO: 415 - DNA, 1251 bp, synthetic construct
  misc_feature 1..1251: note = Variant of acetate kinase
  source 1..1251: mol_type = other DNA
atgcaccatcatcatcatcatggcggtagcggcatgaaagttctggtgattaattctggtagctcctccatcaaatatcagctcctcgatatgaccaacgaaaaggtattagcgaaaggcttggtcgagcgcattggcatcgacggttcgcgtatcgtgcataaagttaacggcgaaaaacacgtgctggaacatgagattaagaatcacgaaattggacttaaattggtcctggatcttcttacggacgaaaaatacggtgtgttgaaggatctcaaagaaatcgatgcagttgggcatcgcgtagtacatggcggcgagcgttttgccagtagcgtgaagattactgacgaagtcttaaagaccatcgagacgttgtcgttcttagctccgttacacaatccagcgaacattatgggtatcaagagcagcatgaaagtgttaccgggtgtgcctcaagttgccgtctttgatacagcgttccaccagaagatgccggagaaagcctatttgtacgcaatcccctatgagtactacgagaaatataaaattcgccgctatgggtttcatggaacctcacatcgttatgtgagtaaacgtgctgcggaaattatgggcaaaccgtacgatcagctcaagatcattaccgttcacgtgggtaacggcgcatcagttgcggcggtgaagaatggcgtatctgttgacacttccatgggtttcacaccacttgaaggtcttgtcatgggcacgcgcagcggcgatattgatccggccatcgtggaatttcttgagaaagaagaaggattgtcggccaaagaagtcgtcaacatcctcaacaagaaatctggtgtgtatgggctcaccaaaggctttagtagtgacatgcgtgacattgaagataatgctcgggaaggtgatcctgtatgccgccttgcattagatgtgtacgaatatcgtatcgcgaaatatattggcgcatacgctgcggccatgaacggtgttgacgcgatcgtctttaccgcaggagttggcgaaaatagcccgattatgcgcgaagaaattattgagaactacttgggctacttagggatcaagatcgataaagaagccaatgacttcaaaggtgaggagaagatcatttcaacgcccgattccaaagtgattgcgatggtagttccgaccaacgaggagctcatgatcgccaaagacacgaaagaaatcattgagaaagggttggacgagcttaagatc

SEQ ID NO: 416 - protein, 417 aa, synthetic construct
  REGION 1..417: note = Variant of acetate kinase
MHHHHHHGGSGMKVLVINSGSSSIKYQLLDMTNEKVLAKGLVERIGIDGSRIVHKVNGEKHVLEHEIKNHEIGLKLVLDLLTDEKYGVLKDLKEIDAVGHRVVHGGERFASSVKITDEVLKTIETLSFLAPLHNPANIMGIKSSMKVLPGVPQVAVFDTAFHQKMPEKAYLYAIPYEYYEKYKIRRYGFHGTSHRYVSKRAAEIMGKPYDQLKIITVHVGNGASVAAVKNGVSVDTSMGFTPLEGLVMGTRSGDIDPAIVEFLEKEEGLSAKEVVNILNKKSGVYGLTKGFSSDMRDIEDNAREGDPVCRLALDVYEYRIAKYIGAYAAAMNGVDAIVFTAGVGENSPIMREEIIENYLGYLGIKIDKEANDFKGEEKIISTPDSKVIAMVVPTNEELMIAKDTKEIIEKGLDELKI

SEQ ID NO: 417 - DNA, 1251 bp, synthetic construct
  misc_feature 1..1251: note = Variant of acetate kinase
  source 1..1251: mol_type = other DNA
atgcaccatcatcatcatcatggcggtagcggcatgaaagttctggtgattaattctggtagctcctccatcaaatatcagctcctcgatatgaccaacgaaaaggtattagcgaaaggcttggtcgagcgcattggcatcgacggttcgcgtatcgtgcataaagttaacggcgaaaaacacgtgctggaacatgagattaagaatcacgaaattggacttaaattggtcctggatcttcttacggacgaaaaatacggtgtgttgaaggatctcaaagaaatcgatgcagttgggcatcgcgtagtacatggcggcgagcgttttgccagtagcgtgaagattactgacgaagtcttaaagaccatcgagacgttgtcgttcttagctccgttacacaatccagcgaacattatgggtatcaagagcagcatgaaagtgttaccgggtgtgcctcaagttgccgtctttgatacagcgttccaccagaagatgccggagaaagcctatttgtacgcaatcccctatgagtactacgagaaatataaaattcgccgctatgggtttcatggaacctcacatcgttatgtgagtaaacgtgctgcggaaattatgggcaaaccgtacgatcagctcaagatcattaccgttcacgtgggtaacggcgcatcagttgcggcggtgaagaatggcgtatctgttgacacttccatgggtttcacaccacttgaaggtcttgtcatgggcacgcgcagcggcgatattgatccggccatcgtggaatttcttgagaaagaagaaggattgtcggccaaagaagtcgtcaacatcctcaacaagaaatctggtgtgtatgggctcaccaaaggctttagtagtgacatgcgtgacattgaatcgaatgctattgaaggtgatcctgtatgccgccttgcattagatgtgtacgaatatcgtatcgcgaaatatattggcgcatacgctgcggccatgaacggtgttgacgcgatcgtctttaccgcaggagttggcgaaaatagcccgattatgcgcgaagaaattattgagaactacttgggctacttagggatcaagatcgataaagaagccaatgacttcaaaggtgaggagaagatcatttcaacgcccgattccaaagtgattgcgatggtagttccgaccaacgaggagctcatgatcgccaaagacacgaaagaaatcattgagaaagggttggacgagcttaagatc

SEQ ID NO: 418 - protein, 417 aa, synthetic construct
  REGION 1..417: note = Variant of acetate kinase
MHHHHHHGGSGMKVLVINSGSSSIKYQLLDMTNEKVLAKGLVERIGIDGSRIVHKVNGEKHVLEHEIKNHEIGLKLVLDLLTDEKYGVLKDLKEIDAVGHRVVHGGERFASSVKITDEVLKTIETLSFLAPLHNPANIMGIKSSMKVLPGVPQVAVFDTAFHQKMPEKAYLYAIPYEYYEKYKIRRYGFHGTSHRYVSKRAAEIMGKPYDQLKIITVHVGNGASVAAVKNGVSVDTSMGFTPLEGLVMGTRSGDIDPAIVEFLEKEEGLSAKEVVNILNKKSGVYGLTKGFSSDMRDIESNAIEGDPVCRLALDVYEYRIAKYIGAYAAAMNGVDAIVFTAGVGENSPIMREEIIENYLGYLGIKIDKEANDFKGEEKIISTPDSKVIAMVVPTNEELMIAKDTKEIIEKGLDELKI

SEQ ID NO: 419 - DNA, 1251 bp, synthetic construct
  misc_feature 1..1251: note = Variant of acetate kinase
  source 1..1251: mol_type = other DNA
atgcaccatcatcatcatcatggcggtagcggcatgaaagttctggtgattaattctggtagctcctccatcaaatatcagctcctcgatatgaccaacgaaaaggtattagcgaaaggcttggtcgagcgcattggcatcgacggttcgcgtatcgtgcataaagttaacggcgaaaaacacgtgctggaacatgagattaagaatcacgaaattggacttaaattggtcctggatcttcttacggacgaaaaatacggtgtgttgaaggatctcaaagaaatcgatgcagttgggcatcgcgtagtacatggcggcgagcgttttgccagtagcgtgaagattactgacgaagtcttaaagaccatcgagacgttgtcgttcttagctccgttacacaatccagcgaacattatgggtatcaagagcagcatgaaagtgttaccgggtgtgcctcaagttgccgtctttgatacagcgttccaccagaagatgccggagaaagcctatttgtacgcaatcccctatgagtactacgagaaatataaaattcgccgctatgggtttcatggaacctcacatcgttatgtgagtaaacgtgctgcggaaattatgggcaaaccgtacgatcagctcaagatcattaccgttcacgtgggtaacggcgcatcagttgcggcggtgaagaatggcgtatctgttgacacttccatgggtttcacaccacttgaaggtcttgtcatgggcacgcgcagcggcgatattgatccggccatcgtggaatttcttgagaaagaagaaggattgtcggccaaagaagtcgtcaacatcctcaacaagaaatctggtgtgtatgggctcaccaaaggctttagtagtgacatgcgtgacattgaatttaatgctattgaaggtgatcctgtatgccgccttgcattagatgtgtacgaatatcgtatcgcgaaatatattggcgcatacgctgcggccatgaacggtgttgacgcgatcgtctttaccgcaggagttggcgaaaatagcccgattatgcgcgaagaaattattgagaactacttgggctacttagggatcaagatcgataaagaagccaatgacttcaaaggtgaggagaagatcatttcaacgcccgattccaaagtgattgcgatggtagttccgaccaacgaggagctcatgatcgccaaagacacgaaagaaatcattgagaaagggttggacgagcttaagatc

SEQ ID NO: 420 - protein, 417 aa, synthetic construct
  REGION 1..417: note = Variant of acetate kinase
MHHHHHHGGSGMKVLVINSGSSSIKYQLLDMTNEKVLAKGLVERIGIDGSRIVHKVNGEKHVLEHEIKNHEIGLKLVLDLLTDEKYGVLKDLKEIDAVGHRVVHGGERFASSVKITDEVLKTIETLSFLAPLHNPANIMGIKSSMKVLPGVPQVAVFDTAFHQKMPEKAYLYAIPYEYYEKYKIRRYGFHGTSHRYVSKRAAEIMGKPYDQLKIITVHVGNGASVAAVKNGVSVDTSMGFTPLEGLVMGTRSGDIDPAIVEFLEKEEGLSAKEVVNILNKKSGVYGLTKGFSSDMRDIEFNAIEGDPVCRLALDVYEYRIAKYIGAYAAAMNGVDAIVFTAGVGENSPIMREEIIENYLGYLGIKIDKEANDFKGEEKIISTPDSKVIAMVVPTNEELMIAKDTKEIIEKGLDELKI

SEQ ID NO: 421 - DNA, 1251 bp, synthetic construct
  misc_feature 1..1251: note = Variant of acetate kinase
  source 1..1251: mol_type = other DNA
atgcaccatcatcatcatcatggcggtagcggcatgaaagttctggtgattaattctggtagctcctccatcaaatatcagctcctcgatatgaccaacgaaaaggtattagcgaaaggcttggtcgagcgcattggcatcgacggttcgcgtatcgtgcataaagttaacggcgaaaaacacgtgctggaacatgagattaagaatcacgaaattggacttaaattggtcctggatcttcttacggacgaaaaatacggtgtgttgaaggatctcaaagaaatcgatgcagttgggcatcgcgtagtacatggcggcgagcgttttgccagtagcgtgaagattactgacgaagtcttaaagaccatcgagacgttgtcgttcttagctccgttacacaatccagcgaacattatgggtatcaagagcagcatgaaagtgttaccgggtgtgcctcaagttgccgtctttgatacagcgttccaccagaagatgccggagaaagcctatttgtacgcaatcccctatgagtactacgagaaatataaaattcgccgctatgggtttcatggaacctcacatcgttatgtgagtaaacgtgctgcggaaattatgggcaaaccgtacgatcagctcaagatcattaccgttcacgtgggtaacggcgcatcagttgcggcggtgaagaatggcgtatctgttgacacttccatgggtttcacaccacttgaaggtcttgtcatgggcacgcgcagcggcgatattgatccggccatcgtggaatttcttgagaaagaagaaggattgtcggccaaagaagtcgtcaacatcctcaacaagaaatctggtgtgtatgggctcaccaaaggctttagtagtgacatgcgtgacattgaaattaatgctattgaaggtgatcctgtatgccgccttgcattagatgtgtacgaatatcgtatcgcgaaatatattggcgcatacgctgcggccatgaacggtgttgacgcgatcgtctttaccgcaggagttggcgaaaatagcccgattatgcgcgaagaaattattgagaactacttgggctacttagggatcaagatcgataaagaagccaatgacttcaaaggtgaggagaagatcatttcaacgcccgattccaaagtgattgcgatggtagttccgaccaacgaggagctcatgatcgccaaagacacgaaagaaatcattgagaaagggttggacgagcttaagatc

SEQ ID NO: 422 - protein, 417 aa, synthetic construct
  REGION 1..417: note = Variant of acetate kinase
MHHHHHHGGSGMKVLVINSGSSSIKYQLLDMTNEKVLAKGLVERIGIDGSRIVHKVNGEKHVLEHEIKNHEIGLKLVLDLLTDEKYGVLKDLKEIDAVGHRVVHGGERFASSVKITDEVLKTIETLSFLAPLHNPANIMGIKSSMKVLPGVPQVAVFDTAFHQKMPEKAYLYAIPYEYYEKYKIRRYGFHGTSHRYVSKRAAEIMGKPYDQLKIITVHVGNGASVAAVKNGVSVDTSMGFTPLEGLVMGTRSGDIDPAIVEFLEKEEGLSAKEVVNILNKKSGVYGLTKGFSSDMRDIEINAIEGDPVCRLALDVYEYRIAKYIGAYAAAMNGVDAIVFTAGVGENSPIMREEIIENYLGYLGIKIDKEANDFKGEEKIISTPDSKVIAMVVPTNEELMIAKDTKEIIEKGLDELKI

SEQ ID NO: 423 - DNA, 1251 bp, synthetic construct
  misc_feature 1..1251: note = Variant of acetate kinase
  source 1..1251: mol_type = other DNA
atgcaccatcatcatcatcatggcggtagcggcatgaaagttctggtgattaattctggtagctcctccatcaaatatcagctcctcgatatgaccaacgaaaaggtattagcgaaaggcttggtcgagcgcattggcatcgacggttcgcgtatcgtgcataaagttaacggcgaaaaacacgtgctggaacatgagattaagaatcacgaaattggacttaaattggtcctggatcttcttacggacgaaaaatacggtgtgttgaaggatctcaaagaaatcgatgcagttgggcatcgcgtagtacatggcggcgagcgttttgccagtagcgtgaagattactgacgaagtcttaaagaccatcgagacgttgtcgttcttagctccgttacacaatccagcgaacattatgggtatcaagagcagcatgaaagtgttaccgggtgtgcctcaagttgccgtctttgatacagcgttccaccagaagatgccggagaaagcctatttgtacgcaatcccctatgagtactacgagaaatataaaattcgccgctatgggtttcatggaacctcacatcgttatgtgagtaaacgtgctgcggaaattatgggcaaaccgtacgatcagctcaagatcattaccgttcacgtgggtaacggcgcatcagttgcggcggtgaagaatggcgtatctgttgacacttccatgggtttcacaccacttgaaggtcttgtcatgggcacgcgcagcggcgatattgatccggccatcgtggaatttcttgagaaagaagaaggattgtcggccaaagaagtcgtcaacatcctcaacaagaaatctggtgtgtatgggctcaccaaaggctttagtagtgacatgcgtgacattgaacagaatgctattgaaggtgatcctgtatgccgccttgcattagatgtgtacgaatatcgtatcgcgaaatatattggcgcatacgctgcggccatgaacggtgttgacgcgatcgtctttaccgcaggagttggcgaaaatagcccgattatgcgcgaagaaattattgagaactacttgggctacttagggatcaagatcgataaagaagccaatgacttcaaaggtgaggagaagatcatttcaacgcccgattccaaagtgattgcgatggtagttccgaccaacgaggagctcatgatcgccaaagacacgaaagaaatcattgagaaagggttggacgagcttaagatc

SEQ ID NO: 424 - protein, 417 aa, synthetic construct
  REGION 1..417: note = Variant of acetate kinase
MHHHHHHGGSGMKVLVINSGSSSIKYQLLDMTNEKVLAKGLVERIGIDGSRIVHKVNGEKHVLEHEIKNHEIGLKLVLDLLTDEKYGVLKDLKEIDAVGHRVVHGGERFASSVKITDEVLKTIETLSFLAPLHNPANIMGIKSSMKVLPGVPQVAVFDTAFHQKMPEKAYLYAIPYEYYEKYKIRRYGFHGTSHRYVSKRAAEIMGKPYDQLKIITVHVGNGASVAAVKNGVSVDTSMGFTPLEGLVMGTRSGDIDPAIVEFLEKEEGLSAKEVVNILNKKSGVYGLTKGFSSDMRDIEQNAIEGDPVCRLALDVYEYRIAKYIGAYAAAMNGVDAIVFTAGVGENSPIMREEIIENYLGYLGIKIDKEANDFKGEEKIISTPDSKVIAMVVPTNEELMIAKDTKEIIEKGLDELKI

SEQ ID NO: 425 - DNA, 1251 bp, synthetic construct
  misc_feature 1..1251: note = Variant of acetate kinase
  source 1..1251: mol_type = other DNA
atgcaccatcatcatcatcatggcggtagcggcatgaaagttctggtgattaattctggtagctcctccatcaaatatcagctcctcgatatgaccaacgaaaaggtattagcgaaaggcttggtcgagcgcattggcatcgacggttcgcgtatcgtgcataaagttaacggcgaaaaacacgtgctggaacatgagattaagaatcacgaaattggacttaaattggtcctggatcttcttacggacgaaaaatacggtgtgttgaaggatctcaaagaaatcgatgcagttgggcatcgcgtagtacatggcggcgagcgttttgccagtagcgtgaagattactgacgaagtcttaaagaccatcgagacgttgtcgttcttagctccgttacacaatccagcgaacattatgggtatcaagagcagcatgaaagtgttaccgggtgtgcctcaagttgccgtctttgatacagcgttccaccagaagatgccggagaaagcctatttgtacgcaatcccctatgagtactacgagaaatataaaattcgccgctatgggtttcatggaacctcacatcgttatgtgagtaaacgtgctgcggaaattatgggcaaaccgtacgatcagctcaagatcattaccgttcacgtgggtaacggcgcatcagttgcggcggtgaagaatggcgtatctgttgacacttccatgggtttcacaccacttgaaggtcttgtcatgggcacgcgcagcggcgatattgatccggccatcgtggaatttcttgagaaagaagaaggattgtcggccaaagaagtcgtcaacatcctcaacaagaaatctggtgtgtatgggctcaccaaaggctttagtagtgacatgcgtgacattgaatataatgctattgaaggtgatcctgtatgccgccttgcattagatgtgtacgaatatcgtatcgcgaaatatattggcgcatacgctgcggccatgaacggtgttgacgcgatcgtctttaccgcaggagttggcgaaaatagcccgattatgcgcgaagaaattattgagaactacttgggctacttagggatcaagatcgataaagaagccaatgacttcaaaggtgaggagaagatcatttcaacgcccgattccaaagtgattgcgatggtagttccgaccaacgaggagctcatgatcgccaaagacacgaaagaaatcattgagaaagggttggacgagcttaagatc

SEQ ID NO: 426 - protein, 417 aa, synthetic construct
  REGION 1..417: note = Variant of acetate kinase
MHHHHHHGGSGMKVLVINSGSSSIKYQLLDMTNEKVLAKGLVERIGIDGSRIVHKVNGEKHVLEHEIKNHEIGLKLVLDLLTDEKYGVLKDLKEIDAVGHRVVHGGERFASSVKITDEVLKTIETLSFLAPLHNPANIMGIKSSMKVLPGVPQVAVFDTAFHQKMPEKAYLYAIPYEYYEKYKIRRYGFHGTSHRYVSKRAAEIMGKPYDQLKIITVHVGNGASVAAVKNGVSVDTSMGFTPLEGLVMGTRSGDIDPAIVEFLEKEEGLSAKEVVNILNKKSGVYGLTKGFSSDMRDIEYNAIEGDPVCRLALDVYEYRIAKYIGAYAAAMNGVDAIVFTAGVGENSPIMREEIIENYLGYLGIKIDKEANDFKGEEKIISTPDSKVIAMVVPTNEELMIAKDTKEIIEKGLDELKI

SEQ ID NO: 427 - DNA, 1251 bp, synthetic construct
  misc_feature 1..1251: note = Variant of acetate kinase
  source 1..1251: mol_type = other DNA
atgcaccatcatcatcatcatggcggtagcggcatgaaagttctggtgattaattctggtagctcctccatcaaatatcagctcctcgatatgaccaacgaaaaggtattagcgaaaggcttggtcgagcgcattggcatcgacggttcgcgtatcgtgcataaagttaacggcgaaaaacacgtgctggaacatgagattaagaatcacgaaattggacttaaattggtcctggatcttcttacggacgaaaaatacggtgtgttgaaggatctcaaagaaatcgatgcagttgggcatcgcgtagtacatggcggcgagcgttttgccagtagcgtgaagattactgacgaagtcttaaagaccatcgagacgttgtcgttcttagctccgttacacaatccagcgaacattatgggtatcaagagcagcatgaaagtgttaccgggtgtgcctcaagttgccgtctttgatacagcgttccaccagaagatgccggagaaagcctatttgtacgcaatcccctatgagtactacgagaaatataaaattcgccgctatgggtttcatggaacctcacatcgttatgtgagtaaacgtgctgcggaaattatgggcaaaccgtacgatcagctcaagatcattaccgttcacgtgggtaacggcgcatcagttgcggcggtgaagaatggcgtatctgttgacacttccatgggtttcacaccacttgaaggtcttgtcatgggcacgcgcagcggcgatattgatccggccatcgtggaatttcttgagaaagaagaaggattgtcggccaaagaagtcgtcaacatcctcaacaagaaatctggtgtgtatgggctcaccaaaggctttagtagtgacatgcgtgacattgaaaataatgctattgaaggtgatcctgtatgccgccttgcattagatgtgtacgaatatcgtatcgcgaaatatattggcgcatacgctgcggccatgaacggtgttgacgcgatcgtctttaccgcaggagttggcgaaaatagcccgattatgcgcgaagaaattattgagaactacttgggctacttagggatcaagatcgataaagaagccaatgacttcaaaggtgaggagaagatcatttcaacgcccgattccaaagtgattgcgatggtagttccgaccaacgaggagctcatgatcgccaaagacacgaaagaaatcattgagaaagggttggacgagcttaagatc

SEQ ID NO: 428 - protein, 417 aa, synthetic construct
  REGION 1..417: note = Variant of acetate kinase
MHHHHHHGGSGMKVLVINSGSSSIKYQLLDMTNEKVLAKGLVERIGIDGSRIVHKVNGEKHVLEHEIKNHEIGLKLVLDLLTDEKYGVLKDLKEIDAVGHRVVHGGERFASSVKITDEVLKTIETLSFLAPLHNPANIMGIKSSMKVLPGVPQVAVFDTAFHQKMPEKAYLYAIPYEYYEKYKIRRYGFHGTSHRYVSKRAAEIMGKPYDQLKIITVHVGNGASVAAVKNGVSVDTSMGFTPLEGLVMGTRSGDIDPAIVEFLEKEEGLSAKEVVNILNKKSGVYGLTKGFSSDMRDIENNAIEGDPVCRLALDVYEYRIAKYIGAYAAAMNGVDAIVFTAGVGENSPIMREEIIENYLGYLGIKIDKEANDFKGEEKIISTPDSKVIAMVVPTNEELMIAKDTKEIIEKGLDELKI

SEQ ID NO: 429 - DNA, 1251 bp, synthetic construct
  misc_feature 1..1251: note = Variant of acetate kinase
  source 1..1251: mol_type = other DNA
atgcaccatcatcatcatcatggcggtagcggcatgaaagttctggtgattaattctggtagctcctccatcaaatatcagctcctcgatatgaccaacgaaaaggtattagcgaaaggcttggtcgagcgcattggcatcgacggttcgcgtatcgtgcataaagttaacggcgaaaaacacgtgctggaacatgagattaagaatcacgaaattggacttaaattggtcctggatcttcttacggacgaaaaatacggtgtgttgaaggatctcaaagaaatcgatgcagttgggcatcgcgtagtacatggcggcgagcgttttgccagtagcgtgaagattactgacgaagtcttaaagaccatcgagacgttgtcgttcttagctccgttacacaatccagcgaacattatgggtatcaagagcagcatgaaagtgttaccgggtgtgcctcaagttgccgtctttgatacagcgttccaccagaagatgccggagaaagcctatttgtacgcaatcccctatgagtactacgagaaatataaaattcgccgctatgggtttcatggaacctcacatcgttatgtgagtaaacgtgctgcggaaattatgggcaaaccgtacgatcagctcaagatcattaccgttcacgtgggtaacggcgcatcagttgcggcggtgaagaatggcgtatctgttgacacttccatgggtttcacaccacttgaaggtcttgtcatgggcacgcgcagcggcgatattgatccggccatcgtggaatttcttgagaaagaagaaggattgtcggccaaagaagtcgtcaacatcctcaacaagaaatctggtgtgtatgggctcaccaaaggctttagtagtgacatgcgtgacattgaagataatgctattgaaggtgatcctgtatgccgccttgcattagatgtgtacctgtatcgtatcgcgaaatatattggcgcatacgctgcggccatgaacggtgttgacgcgatcgtctttaccgcaggagttggcgaaaatagcccgattatgcgcgaagaaattattgagaactacttgggctacttagggatcaagatcgataaagaagccaatgacttcaaaggtgaggagaagatcatttcaacgcccgattccaaagtgattgcgatggtagttccgaccaacgaggagctcatgatcgccaaagacacgaaagaaatcattgagaaagggttggacgagcttaagatc

SEQ ID NO: 430 - protein, 417 aa, synthetic construct
  REGION 1..417: note = Variant of acetate kinase
MHHHHHHGGSGMKVLVINSGSSSIKYQLLDMTNEKVLAKGLVERIGIDGSRIVHKVNGEKHVLEHEIKNHEIGLKLVLDLLTDEKYGVLKDLKEIDAVGHRVVHGGERFASSVKITDEVLKTIETLSFLAPLHNPANIMGIKSSMKVLPGVPQVAVFDTAFHQKMPEKAYLYAIPYEYYEKYKIRRYGFHGTSHRYVSKRAAEIMGKPYDQLKIITVHVGNGASVAAVKNGVSVDTSMGFTPLEGLVMGTRSGDIDPAIVEFLEKEEGLSAKEVVNILNKKSGVYGLTKGFSSDMRDIEDNAIEGDPVCRLALDVYLYRIAKYIGAYAAAMNGVDAIVFTAGVGENSPIMREEIIENYLGYLGIKIDKEANDFKGEEKIISTPDSKVIAMVVPTNEELMIAKDTKEIIEKGLDELKI

SEQ ID NO: 431 - DNA, 1251 bp, synthetic construct
  misc_feature 1..1251: note = Variant of acetate kinase
  source 1..1251: mol_type = other DNA
atgcaccatcatcatcatcatggcggtagcggcatgaaagttctggtgattaattctggtagctcctccatcaaatatcagctcctcgatatgaccaacgaaaaggtattagcgaaaggcttggtcgagcgcattggcatcgacggttcgcgtatcgtgcataaagttaacggcgaaaaacacgtgctggaacatgagattaagaatcacgaaattggacttaaattggtcctggatcttcttacggacgaaaaatacggtgtgttgaaggatctcaaagaaatcgatgcagttgggcatcgcgtagtacatggcggcgagcgttttgccagtagcgtgaagattactgacgaagtcttaaagaccatcgagacgttgtcgttcttagctccgttacacaatccagcgaacattatgggtatcaagagcgcgatgaaagtgttaccgggtgtgcctcaagttgccgtctttgatacagcgttccaccagaagatgccggagaaagcctatttgtacgcaatcccctatgagtactacgagaaatataaaattcgccgctatgggtttcatggaacctcacatcgttatgtgagtaaacgtgctgcggaaattatgggcaaaccgtacgatcagctcaagatcattaccgttcacgtgggtaacggcgcatcagttgcggcggtgaagaatggcgtatctgttgacacttccatgggtttcacaccacttgaaggtcttgtcatgggcacgcgcagcggcgatattgatccggccatcgtggaatttcttgagaaagaagaaggattgtcggccaaagaagtcgtcaacatcctcaacaagaaatctggtgtgtatgggctcaccaaaggctttagtagtgacatgcgtgacattgaagataatgctattgaaggtgatcctgtatgccgccttgcattagatgtgtacgaatatcgtatcgcgaaatatattggcgcatacgctgcggccatgaacggtgttgacgcgatcgtctttaccgcaggagttggcgaaaatagcccgattatgcgcgaagaaattattgagaactacttgggctacttagggatcaagatcgataaagaagccaatgacttcaaaggtgaggagaagatcatttcaacgcccgattccaaagtgattgcgatggtagttccgaccaacgaggagctcatgatcgccaaagacacgaaagaaatcattgagaaagggttggacgagcttaagatc

SEQ ID NO: 432 - protein, 417 aa, synthetic construct
  REGION 1..417: note = Variant of acetate kinase
MHHHHHHGGSGMKVLVINSGSSSIKYQLLDMTNEKVLAKGLVERIGIDGSRIVHKVNGEKHVLEHEIKNHEIGLKLVLDLLTDEKYGVLKDLKEIDAVGHRVVHGGERFASSVKITDEVLKTIETLSFLAPLHNPANIMGIKSAMKVLPGVPQVAVFDTAFHQKMPEKAYLYAIPYEYYEKYKIRRYGFHGTSHRYVSKRAAEIMGKPYDQLKIITVHVGNGASVAAVKNGVSVDTSMGFTPLEGLVMGTRSGDIDPAIVEFLEKEEGLSAKEVVNILNKKSGVYGLTKGFSSDMRDIEDNAIEGDPVCRLALDVYEYRIAKYIGAYAAAMNGVDAIVFTAGVGENSPIMREEIIENYLGYLGIKIDKEANDFKGEEKIISTPDSKVIAMVVPTNEELMIAKDTKEIIEKGLDELKI

SEQ ID NO: 433 - DNA, 1251 bp, synthetic construct
  misc_feature 1..1251: note = Variant of acetate kinase
  source 1..1251: mol_type = other DNA
atgcaccatcatcatcatcatggcggtagcggcatgaaagttctggtgattaattctggtagctcctccatcaaatatcagctcctcgatatgaccaacgaaaaggtattagcgaaaggcttggtcgagcgcattggcatcgacggttcgcgtatcgtgcataaagttaacggcgaaaaacacgtgctggaacatgagattaagaatcacgaaattggacttaaattggtcctggatcttcttacggacgaaaaatacggtgtgttgaaggatctcaaagaaatcgatgcagttgggcatcgcgtagtacatggcggcgagcgttttgccagtagcgtgaagattactgacgaagtcttaaagaccatcgagacgttgtcgttcttagctccgttacacaatccagcgaacattatgggtatcaagagcagcatgaaagtgttaccgggtgtgcctcaagttgccgtctttgatacagcgttccaccagaagatgccggagaaagcctatttgtacgcaatcccctatgagtactacgagaaatataaaattcgccgctatgggtttcatggaacctcacatcgttatgtgagtaaacgtgctgcggaaattatgggcaaaccgtacgatcagctcaagatcattaccgttcacgtgggtaacggcgcatcagttgcggcggtgaagaatggcgtatctgttgacacttccatgggtttcacaccacttgaaggtcttgtcatgggcacgcgcagcggcgatattgatccggccatcgtggaatttcttgagaaagaagaaggattgtcggccaaagaagtcgtcaacatcctcaacaagaaatctggtgtgtatgggctcaccaaaggctttagtagtgacatgcgtgacattgaagataatgctattgaaggtgatcctgtatgccgccttgcattagatgtgtactattatcgtatcgcgaaatatattggcgcatacgctgcggccatgaacggtgttgacgcgatcgtctttaccgcaggagttggcgaaaatagcccgattatgcgcgaagaaattattgagaactacttgggctacttagggatcaagatcgataaagaagccaatgacttcaaaggtgaggagaagatcatttcaacgcccgattccaaagtgattgcgatggtagttccgaccaacgaggagctcatgatcgccaaagacacgaaagaaatcattgagaaagggttggacgagcttaagatc

SEQ ID NO: 434 - protein, 417 aa, synthetic construct
  REGION 1..417: note = Variant of acetate kinase
MHHHHHHGGSGMKVLVINSGSSSIKYQLLDMTNEKVLAKGLVERIGIDGSRIVHKVNGEKHVLEHEIKNHEIGLKLVLDLLTDEKYGVLKDLKEIDAVGHRVVHGGERFASSVKITDEVLKTIETLSFLAPLHNPANIMGIKSSMKVLPGVPQVAVFDTAFHQKMPEKAYLYAIPYEYYEKYKIRRYGFHGTSHRYVSKRAAEIMGKPYDQLKIITVHVGNGASVAAVKNGVSVDTSMGFTPLEGLVMGTRSGDIDPAIVEFLEKEEGLSAKEVVNILNKKSGVYGLTKGFSSDMRDIEDNAIEGDPVCRLALDVYYYRIAKYIGAYAAAMNGVDAIVFTAGVGENSPIMREEIIENYLGYLGIKIDKEANDFKGEEKIISTPDSKVIAMVVPTNEELMIAKDTKEIIEKGLDELKI

SEQ ID NO: 435 - DNA, 1251 bp, synthetic construct
  misc_feature 1..1251: note = Variant of acetate kinase
  source 1..1251: mol_type = other DNA
atgcaccatcatcatcatcatggcggtagcggcatgaaagttctggtgattaattctggtagctcctccatcaaatatcagctcctcgatatgaccaacgaaaaggtattagcgaaaggcttggtcgagcgcattggcatcgacggttcgcgtatcgtgcataaagttaacggcgaaaaacacgtgctggaacatgagattaagaatcacgaaattggacttaaattggtcctggatcttcttacggacgaaaaatacggtgtgttgaaggatctcaaagaaatcgatgcagttgggcatcgcgtagtacatggcggcgagcgttttgccagtagcgtgaagattactgacgaagtcttaaagaccatcgagacgttgtcgttcttagctccgttacacaatccagcgaacattatgggtatcaagagcagcatgaaagtgttaccgggtgtgcctcaagttgccgtctttgatacagcgttccaccagaagatgccggagaaagcctatttgtacgcaatcccctatgagtactacgagaaatataaaattcgccgctatgggtttcatggaacctcacatcgttatgtgagtaaacgtgctgcggaaattatgggcaaaccgtacgatcagctcaagatcattaccgttcacgtgggtaacggcgcatcagttgcggcggtgaagaatggcgtatctgttgacacttccatgggtttcacaccacttgaaggtcttgtcatgggcacgcgcagcggcgatattgatccggccatcgtggaatttcttgagaaagaagaaggattgtcggccaaagaagtcgtcaacatcctcaacaagaaatctggtgtgtatgggctcaccaaaggctttagtagtgacatgcgtgacattgaagataatgctatggaaggtgatcctgtatgccgccttgcattagatgtgtacgaatatcgtatcgcgaaatatattggcgcatacgctgcggccatgaacggtgttgacgcgatcgtctttaccgcaggagttggcgaaaatagcccgattatgcgcgaagaaattattgagaactacttgggctacttagggatcaagatcgataaagaagccaatgacttcaaaggtgaggagaagatcatttcaacgcccgattccaaagtgattgcgatggtagttccgaccaacgaggagctcatgatcgccaaagacacgaaagaaatcattgagaaagggttggacgagcttaagatc

SEQ ID NO: 436 - protein, 417 aa, synthetic construct
  REGION 1..417: note = Variant of acetate kinase
MHHHHHHGGSGMKVLVINSGSSSIKYQLLDMTNEKVLAKGLVERIGIDGSRIVHKVNGEKHVLEHEIKNHEIGLKLVLDLLTDEKYGVLKDLKEIDAVGHRVVHGGERFASSVKITDEVLKTIETLSFLAPLHNPANIMGIKSSMKVLPGVPQVAVFDTAFHQKMPEKAYLYAIPYEYYEKYKIRRYGFHGTSHRYVSKRAAEIMGKPYDQLKIITVHVGNGASVAAVKNGVSVDTSMGFTPLEGLVMGTRSGDIDPAIVEFLEKEEGLSAKEVVNILNKKSGVYGLTKGFSSDMRDIEDNAMEGDPVCRLALDVYEYRIAKYIGAYAAAMNGVDAIVFTAGVGENSPIMREEIIENYLGYLGIKIDKEANDFKGEEKIISTPDSKVIAMVVPTNEELMIAKDTKEIIEKGLDELKI

SEQ ID NO: 437 - DNA, 1251 bp, synthetic construct
  misc_feature 1..1251: note = Variant of acetate kinase
  source 1..1251: mol_type = other DNA
atgcaccatcatcatcatcatggcggtagcggcatgaaagttctggtgattaattctggtagctcctccatcaaatatcagctcctcgatatgaccaacgaaaaggtattagcgaaaggcttggtcgagcgcattggcatcgacggttcgcgtatcgtgcataaagttaacggcgaaaaacacgtgctggaacatgagattaagaatcacgaaattggacttaaattggtcctggatcttcttacggacgaaaaatacggtgtgttgaaggatctcaaagaaatcgatgcagttgggcatcgcgtagtacatggcggcgagcgttttgccagtagcgtgaagattactgacgaagtcttaaagaccatcgagacgttgtcgttcttagctccgttacacaatccagcgaacattatgggtatcaagagcagcatgaaagtgttaccgggtgtgcctcaagttgccgtctttgatacagcgttccaccagaagatgccggagaaagcctatttgtacgcaatcccctatgagtactacgagaaatataaaattcgccgctatgggtttcatggaacctcacatcgttatgtgagtaaacgtgctgcggaaattatgggcaaaccgtacgatcagctcaagatcattaccgttcacgtgggtaacggcgcatcagttgcggcggtgaagaatggcgtatctgttgacacttccatgggtttcacaccacttgaaggtcttgtcatgggcacgcgcagcggcgatattgatccggccatcgtggaatttcttgagaaagaagaaggattgtcggccaaagaagtcgtcaacatcctcaacaagaaatctggtgtgtatgggctcaccaaaggctttagtagtgacatgcgtgacattgaagataatgctattgaaggtgatcctgtatgccgccttgcattagatgtgtacgaatatcgtatcgcgaaatatattggcgcatacgctgcggccatgaacggtgttgacgcgatcgtctttaccgcaggagttggcgaaaatagcccgattatgcgcgaagaaattattgagaactacttgggctacttagggatcaagatcgataaagaagccaatgacttccggggtgaggagaagatcatttcaacgcccgattccaaagtgattgcgatggtagttccgaccaacgaggagctcatgatcgccaaagacacgaaagaaatcattgagaaagggttggacgagcttaagatc

SEQ ID NO: 438 - protein, 417 aa, synthetic construct
  REGION 1..417: note = Variant of acetate kinase
MHHHHHHGGSGMKVLVINSGSSSIKYQLLDMTNEKVLAKGLVERIGIDGSRIVHKVNGEKHVLEHEIKNHEIGLKLVLDLLTDEKYGVLKDLKEIDAVGHRVVHGGERFASSVKITDEVLKTIETLSFLAPLHNPANIMGIKSSMKVLPGVPQVAVFDTAFHQKMPEKAYLYAIPYEYYEKYKIRRYGFHGTSHRYVSKRAAEIMGKPYDQLKIITVHVGNGASVAAVKNGVSVDTSMGFTPLEGLVMGTRSGDIDPAIVEFLEKEEGLSAKEVVNILNKKSGVYGLTKGFSSDMRDIEDNAIEGDPVCRLALDVYEYRIAKYIGAYAAAMNGVDAIVFTAGVGENSPIMREEIIENYLGYLGIKIDKEANDFRGEEKIISTPDSKVIAMVVPTNEELMIAKDTKEIIEKGLDELKI

SEQ ID NO: 439 - DNA, 1251 bp, synthetic construct
  misc_feature 1..1251: note = Variant of acetate kinase
  source 1..1251: mol_type = other DNA
atgcaccatcatcatcatcatggcggtagcggcatgaaagttctggtgattaattctggtagctcctccatcaaatatcagctcctcgatatgaccaacgaaaaggtattagcgaaaggcttggtcgagcgcattggcatcgacggttcgcgtatcgtgcataaagttaacggcgaaaaacacgtgatggaacatgagattaagaatcacgaaattggacttaaattggtcctggatcttcttacggacgaaaaatacggtgtgttgaaggatctcaaagaaatcgatgcagttgggcatcgcgtagtacatggcggcgagcgttttgccagtagcgtgaagattactgacgaagtcttaaagaccatcgagacgttgtcgttcttagctccgttacacaatccagcgaacattatgggtatcaagagcagcatgaaagtgttaccgggtgtgcctcaagttgccgtctttgatacagcgttccaccagaagatgccggagaaagcctatttgtacgcaatcccctatgagtactacgagaaatataaaattcgccgctatgggtttcatggaacctcacatcgttatgtgagtaaacgtgctgcggaaattatgggcaaaccgtacgatcagctcaagatcattaccgttcacgtgggtaacggcgcatcagttgcggcggtgaagaatggcgtatctgttgacacttccatgggtttcacaccacttgaaggtcttgtcatgggcacgcgcagcggcgatattgatccggccatcgtggaatttcttgagaaagaagaaggattgtcggccaaagaagtcgtcaacatcctcaacaagaaatctggtgtgtatgggctcaccaaaggctttagtagtgacatgcgtgacattgaagataatgctattgaaggtgatcctgtatgccgccttgcattagatgtgtacgaatatcgtatcgcgaaatatattggcgcatacgctgcggccatgaacggtgttgacgcgatcgtctttaccgcaggagttggcgaaaatagcccgattatgcgcgaagaaattattgagaactacttgggctacttagggatcaagatcgataaagaagccaatgacttcaaaggtgaggagaagatcatttcaacgcccgattccaaagtgattgcgatggtagttccgaccaacgaggagctcatgatcgccaaagacacgaaagaaatcattgagaaagggttggacgagcttaagatc

SEQ ID NO: 440 - protein, 417 aa, synthetic construct
  REGION 1..417: note = Variant of acetate kinase
MHHHHHHGGSGMKVLVINSGSSSIKYQLLDMTNEKVLAKGLVERIGIDGSRIVHKVNGEKHVMEHEIKNHEIGLKLVLDLLTDEKYGVLKDLKEIDAVGHRVVHGGERFASSVKITDEVLKTIETLSFLAPLHNPANIMGIKSSMKVLPGVPQVAVFDTAFHQKMPEKAYLYAIPYEYYEKYKIRRYGFHGTSHRYVSKRAAEIMGKPYDQLKIITVHVGNGASVAAVKNGVSVDTSMGFTPLEGLVMGTRSGDIDPAIVEFLEKEEGLSAKEVVNILNKKSGVYGLTKGFSSDMRDIEDNAIEGDPVCRLALDVYEYRIAKYIGAYAAAMNGVDAIVFTAGVGENSPIMREEIIENYLGYLGIKIDKEANDFKGEEKIISTPDSKVIAMVVPTNEELMIAKDTKEIIEKGLDELKI

SEQ ID NO: 441 - DNA, 1251 bp, synthetic construct
  misc_feature 1..1251: note = Variant of acetate kinase
  source 1..1251: mol_type = other DNA
atgcaccatcatcatcatcatggcggtagcggcatgaaagttctggtgattaattctggtagctcctccatcaaatatcagctcctcgatatgaccaacgaaaaggtattagcgaaaggcttggtcgagcgcattggcatcgacggttcgcgtatcgtgcataaagttaacggcgaaaaacacgtgctggaacatgagattaagaatcacgaaattggacttaaattggtcctggatcttcttacggacgaaaaatacggtgtgttgaaggatctcaaagaaatcgatgcagttgggcatcgcgtagtacatggcggcgagcgttttgccagtagcgtgaagattactgacgaagtcttaaagaccatcgagacgttgtcgttcttagctccgttacacaatccagcgaacattatgggtatcaagagcagcatgaaagtgttaccgggtgtgcctcaagttgccgtctttgatacagcgttccaccagaagatgccggagaaagcctatttgtacgcaatcccctatgagtactacgagaaatataaaattcgccgctatgggtttcatggaacctcacatcgttatgtgagtaaacgtgctgcggaaattatgggcaaaccgtacgatcagctcaagatcattaccgttcacgtgggtaacggcgcatcagttgcggcggtgaagaatggcgtatctgttgacacttccatgggtttcacaccacttgaaggtcttgtcatgggcacgcgcagcggcgatattgatccggccatcgtggaatttcttgagaaagaagaaggattgtcggccaaagaagtcgtcaacatcctcaacaagaaatctggtgtgtatgggctcaccaaaggctttagtagtgacatgcgtgacattgaagataaggctattgaaggtgatcctgtatgccgccttgcattagatgtgtacgaatatcgtatcgcgaaatatattggcgcatacgctgcggccatgaacggtgttgacgcgatcgtctttaccgcaggagttggcgaaaatagcccgattatgcgcgaagaaattattgagaactacttgggctacttagggatcaagatcgataaagaagccaatgacttcaaaggtgaggagaagatcatttcaacgcccgattccaaagtgattgcgatggtagttccgaccaacgaggagctcatgatcgccaaagacacgaaagaaatcattgagaaagggttggacgagcttaagatc

SEQ ID NO: 442 - protein, 417 aa, synthetic construct
  REGION 1..417: note = Variant of acetate kinase
MHHHHHHGGSGMKVLVINSGSSSIKYQLLDMTNEKVLAKGLVERIGIDGSRIVHKVNGEKHVLEHEIKNHEIGLKLVLDLLTDEKYGVLKDLKEIDAVGHRVVHGGERFASSVKITDEVLKTIETLSFLAPLHNPANIMGIKSSMKVLPGVPQVAVFDTAFHQKMPEKAYLYAIPYEYYEKYKIRRYGFHGTSHRYVSKRAAEIMGKPYDQLKIITVHVGNGASVAAVKNGVSVDTSMGFTPLEGLVMGTRSGDIDPAIVEFLEKEEGLSAKEVVNILNKKSGVYGLTKGFSSDMRDIEDKAIEGDPVCRLALDVYEYRIAKYIGAYAAAMNGVDAIVFTAGVGENSPIMREEIIENYLGYLGIKIDKEANDFKGEEKIISTPDSKVIAMVVPTNEELMIAKDTKEIIEKGLDELKI

SEQ ID NO: 443 - DNA, 1251 bp, synthetic construct
  misc_feature 1..1251: note = Variant of acetate kinase
  source 1..1251: mol_type = other DNA
atgcaccatcatcatcatcatggcggtagcggcatgaaagttctggtgattaattctggtagctcctccatcaaatatcagctcctcgatatgaccaacgaaaaggtattagcgaaaggcttggtcgagcgcattggcatcgacggttcgcgtatcgtgcataaagttaacggcgaaaaacacgtgctggaacatgagattaagaatcacgaaattggacttaaattggtcctggatcttcttacggacgaaaaatacggtgtgttgaaggatctcaaagaaatcgatgcagttgggcatcgcgtagtacatggcggcgagcgttttgccagtagcgtgaagattactgacgaagtcttaaagaccatcgagacgttgtcgttcttagctccgttacacttgccagcgaacattatgggtatcaagagcagcatgaaagtgttaccgggtgtgcctcaagttgccgtctttgatacagcgttccaccagaagatgccggagaaagcctatttgtacgcaatcccctatgagtactacgagaaatataaaattcgccgctatgggtttcatggaacctcacatcgttatgtgagtaaacgtgctgcggaaattatgggcaaaccgtacgatcagctcaagatcattaccgttcacgtgggtaacggcgcatcagttgcggcggtgaagaatggcgtatctgttgacacttccatgggtttcacaccacttgaaggtcttgtcatgggcacgcgcagcggcgatattgatccggccatcgtggaatttcttgagaaagaagaaggattgtcggccaaagaagtcgtcaacatcctcaacaagaaatctggtgtgtatgggctcaccaaaggctttagtagtgacatgcgtgacattgaagataatgctattgaaggtgatcctgtatgccgccttgcattagatgtgtacgaatatcgtatcgcgaaatatattggcgcatacgctgcggccatgaacggtgttgacgcgatcgtctttaccgcaggagttggcgaaaatagcccgattatgcgcgaagaaattattgagaactacttgggctacttagggatcaagatcgataaagaagccaatgacttcaaaggtgaggagaagatcatttcaacgcccgattccaaagtgattgcgatggtagttccgaccaacgaggagctcatgatcgccaaagacacgaaagaaatcattgagaaagggttggacgagcttaagatc

SEQ ID NO: 444 - protein, 417 aa, synthetic construct
  REGION 1..417: note = Variant of acetate kinase
MHHHHHHGGSGMKVLVINSGSSSIKYQLLDMTNEKVLAKGLVERIGIDGSRIVHKVNGEKHVLEHEIKNHEIGLKLVLDLLTDEKYGVLKDLKEIDAVGHRVVHGGERFASSVKITDEVLKTIETLSFLAPLHLPANIMGIKSSMKVLPGVPQVAVFDTAFHQKMPEKAYLYAIPYEYYEKYKIRRYGFHGTSHRYVSKRAAEIMGKPYDQLKIITVHVGNGASVAAVKNGVSVDTSMGFTPLEGLVMGTRSGDIDPAIVEFLEKEEGLSAKEVVNILNKKSGVYGLTKGFSSDMRDIEDNAIEGDPVCRLALDVYEYRIAKYIGAYAAAMNGVDAIVFTAGVGENSPIMREEIIENYLGYLGIKIDKEANDFKGEEKIISTPDSKVIAMVVPTNEELMIAKDTKEIIEKGLDELKI

SEQ ID NO: 445 - DNA, 1251 bp, synthetic construct
  misc_feature 1..1251: note = Variant of acetate kinase
  source 1..1251: mol_type = other DNA
atgcaccatcatcatcatcatggcggtagcggcatgaaagttctggtgattaattctggtagctcctccatcaaatatcagctcctcgatatgaccaacgaaaaggtattagcgaaaggcttggtcgagcgcattggcatcgacggttcgcgtatcgtgcataaagttaacggcgaaaaacacgtgctggaacatgagattaagaatcacgaaattggacttaaattggtcctggatcttcttacggacgaaaaatacggtgtgttgaaggatctcaaagaaatcgatgcagttgggcatcgcgtagtacatggcggcgagcgttttgccagtagcgtgaagattactgacgaagtcttaaagaccatcgagacgttgtcgttcttagctccgttacacaatccagcgaacattatgggtatcaagagcagcatgaaagtgttaccgggtgtgcctcaagttgccgtctttgatacagcgttccaccagaagatgccggagaaagcctatttgtacgcaatcccctatgagtactacgagaaatataaaattcgccgctatgggtttcatggaacctcacatcgttatgtgagtaaacgtgctgcggaaattatgggcaaaccgtacgatcagctcaagatcattaccgttcacgtgggtaacggcgcatcagttgcggcggtgaagaatggcgtatctgttgacacttccatgggtttcacaccacttgaaggtcttgtcatgggcacgcgcagcggcgatattgatccggccatcgtggaatttcttgagaaagaagaaggattgtcggccaaagaagtcgtcaacatcctcaacaagaaatctggtgtgtatgggctcaccaaaggctttagtagtgacatgcgtgacattgaagattctgctattgaaggtgatcctgtatgccgccttgcattagatgtgtacgaatatcgtatcgcgaaatatattggcgcatacgctgcggccatgaacggtgttgacgcgatcgtctttaccgcaggagttggcgaaaatagcccgattatgcgcgaagaaattattgagaactacttgggctacttagggatcaagatcgataaagaagccaatgacttcaaaggtgaggagaagatcatttcaacgcccgattccaaagtgattgcgatggtagttccgaccaacgaggagctcatgatcgccaaagacacgaaagaaatcattgagaaagggttggacgagcttaagatc

SEQ ID NO: 446 - protein, 417 aa, synthetic construct
  REGION 1..417: note = Variant of acetate kinase
MHHHHHHGGSGMKVLVINSGSSSIKYQLLDMTNEKVLAKGLVERIGIDGSRIVHKVNGEKHVLEHEIKNHEIGLKLVLDLLTDEKYGVLKDLKEIDAVGHRVVHGGERFASSVKITDEVLKTIETLSFLAPLHNPANIMGIKSSMKVLPGVPQVAVFDTAFHQKMPEKAYLYAIPYEYYEKYKIRRYGFHGTSHRYVSKRAAEIMGKPYDQLKIITVHVGNGASVAAVKNGVSVDTSMGFTPLEGLVMGTRSGDIDPAIVEFLEKEEGLSAKEVVNILNKKSGVYGLTKGFSSDMRDIEDSAIEGDPVCRLALDVYEYRIAKYIGAYAAAMNGVDAIVFTAGVGENSPIMREEIIENYLGYLGIKIDKEANDFKGEEKIISTPDSKVIAMVVPTNEELMIAKDTKEIIEKGLDELKI

SEQ ID NO: 447 - DNA, 1251 bp, synthetic construct
  misc_feature 1..1251: note = Variant of acetate kinase
  source 1..1251: mol_type = other DNA
atgcaccatcatcatcatcatggcggtagcggcatgaaagttctggtgattaattctggtagctcctccatcaaatatcagctcctcgatatgaccaacgaaaaggtattagcgaaaggcttggtcgagcgcattggcatcgacggttcgcgtatcgtgcataaagttaacggcgaagcgcacgtgctggaacatgagattaagaatcacgaaattggacttaaattggtcctggatcttcttacggacgaaaaatacggtgtgttgaaggatctcaaagaaatcgatgcagttgggcatcgcgtagtacatggcggcgagcgttttgccagtagcgtgaagattactgacgaagtcttaaagaccatcgagacgttgtcgttcttagctccgttacacaatccagcgaacattatgggtatcaagagcagcatgaaagtgttaccgggtgtgcctcaagttgccgtctttgatacagcgttccaccagaagatgccggagaaagcctatttgtacgcaatcccctatgagtactacgagaaatataaaattcgccgctatgggtttcatggaacctcacatcgttatgtgagtaaacgtgctgcggaaattatgggcaaaccgtacgatcagctcaagatcattaccgttcacgtgggtaacggcgcatcagttgcggcggtgaagaatggcgtatctgttgacacttccatgggtttcacaccacttgaaggtcttgtcatgggcacgcgcagcggcgatattgatccggccatcgtggaatttcttgagaaagaagaaggattgtcggccaaagaagtcgtcaacatcctcaacaagaaatctggtgtgtatgggctcaccaaaggctttagtagtgacatgcgtgacattgaagataatgctattgaaggtgatcctgtatgccgccttgcattagatgtgtacgaatatcgtatcgcgaaatatattggcgcatacgctgcggccatgaacggtgttgacgcgatcgtctttaccgcaggagttggcgaaaatagcccgattatgcgcgaagaaattattgagaactacttgggctacttagggatcaagatcgataaagaagccaatgacttcaaaggtgaggagaagatcatttcaacgcccgattccaaagtgattgcgatggtagttccgaccaacgaggagctcatgatcgccaaagacacgaaagaaatcattgagaaagggttggacgagcttaagatc

SEQ ID NO: 448 - protein, 417 aa, synthetic construct
  REGION 1..417: note = Variant of acetate kinase
MHHHHHHGGSGMKVLVINSGSSSIKYQLLDMTNEKVLAKGLVERIGIDGSRIVHKVNGEAHVLEHEIKNHEIGLKLVLDLLTDEKYGVLKDLKEIDAVGHRVVHGGERFASSVKITDEVLKTIETLSFLAPLHNPANIMGIKSSMKVLPGVPQVAVFDTAFHQKMPEKAYLYAIPYEYYEKYKIRRYGFHGTSHRYVSKRAAEIMGKPYDQLKIITVHVGNGASVAAVKNGVSVDTSMGFTPLEGLVMGTRSGDIDPAIVEFLEKEEGLSAKEVVNILNKKSGVYGLTKGFSSDMRDIEDNAIEGDPVCRLALDVYEYRIAKYIGAYAAAMNGVDAIVFTAGVGENSPIMREEIIENYLGYLGIKIDKEANDFKGEEKIISTPDSKVIAMVVPTNEELMIAKDTKEIIEKGLDELKI

SEQ ID NO: 449 - DNA, 1251 bp, synthetic construct
  misc_feature 1..1251: note = Variant of acetate kinase
  source 1..1251: mol_type = other DNA
atgcaccatcatcatcatcatggcggtagcggcatgaaagttctggtgattaattctggtagctcctccatcaaatatcagctcctcgatatgaccaacgaaaaggtattagcgaaaggcttggtcgagcgcattggcatcgacggttcgcgtatcgtgcataaagttaacggcgaaaaacacgtgctggaacatgagattaagaatcacgaaattggacttaaattggtcctggatcttcttacggacgaaaaatacggtgtgttgaaggatctcaaagaaatcgatgcagttgggcatcgcgtagtacatggcggcgagcgttttgccagtagcgtgaagattactgacgaagtcttaaagaccatcgagacgttgtcgttcttagctccgttacacaatccagcgaacattatgggtatcaagagcagcatgaaagtgttaccgggtgtgcctcaagttgccgtctttgatacagcgttccaccagaagatgccggagaaagcctatttgtacgcaatcccctatgagtactacgagaaatataaaattcgccgctatgggtttcatggaacctcacatcgttatgtgagtaaacgtgctgcggaaattatgggcaaaccgtacgatcagctcaagatcattaccgttcacgtgggtaacggcgcatcagttgcggcggtgaagaatggcgtatctgttgacacttccatgggtttcacaccacttgaaggtcttgtcatgggcacgcgcagcggcgatattgatccggccatcgtggaatttcttgagaaagaagaaggattgtcggccaaagaagtcgtcaacatcctcaacaagaaatctggtgtgtatgggctcaccaaaggctttagtagtgacatgcgtgacattgaatggaatgctattgaaggtgatcctgtatgccgccttgcattagatgtgtacgaatatcgtatcgcgaaatatattggcgcatacgctgcggccatgaacggtgttgacgcgatcgtctttaccgcaggagttggcgaaaatagcccgattatgcgcgaagaaattattgagaactacttgggctacttagggatcaagatcgataaagaagccaatgacttcaaaggtgaggagaagatcatttcaacgcccgattccaaagtgattgcgatggtagttccgaccaacgaggagctcatgatcgccaaagacacgaaagaaatcattgagaaagggttggacgagcttaagatc

SEQ ID NO: 450 - protein, 417 aa, synthetic construct
  REGION 1..417: note = Variant of acetate kinase
MHHHHHHGGSGMKVLVINSGSSSIKYQLLDMTNEKVLAKGLVERIGIDGSRIVHKVNGEKHVLEHEIKNHEIGLKLVLDLLTDEKYGVLKDLKEIDAVGHRVVHGGERFASSVKITDEVLKTIETLSFLAPLHNPANIMGIKSSMKVLPGVPQVAVFDTAFHQKMPEKAYLYAIPYEYYEKYKIRRYGFHGTSHRYVSKRAAEIMGKPYDQLKIITVHVGNGASVAAVKNGVSVDTSMGFTPLEGLVMGTRSGDIDPAIVEFLEKEEGLSAKEVVNILNKKSGVYGLTKGFSSDMRDIEWNAIEGDPVCRLALDVYEYRIAKYIGAYAAAMNGVDAIVFTAGVGENSPIMREEIIENYLGYLGIKIDKEANDFKGEEKIISTPDSKVIAMVVPTNEELMIAKDTKEIIEKGLDELKI

SEQ ID NO: 451 - DNA, 1251 bp, synthetic construct
  misc_feature 1..1251: note = Variant of acetate kinase
  source 1..1251: mol_type = other DNA
atgcaccatcatcatcatcatggcggtagcggcatgaaagttctggtgattaattctggtagctcctccatcaaatatcagctcctcgatatgaccaacgaaaaggtattagcgaaaggcttggtcgagcgcattggcatcgacggttcgcgtatcgtgcataaagttaacggcgaaaaacacgtgctggaaagtgagattaagaatcacgaaattggacttaaattggtcctggatcttcttacggacgaaaaatacggtgtgttgaaggatctcaaagaaatcgatgcagttgggcatcgcgtagtacatggcggcgagcgttttgccagtagcgtgaagattactgacgaagtcttaaagaccatcgagacgttgtcgttcttagctccgttacacaatccagcgaacattatgggtatcaagagcagcatgaaagtgttaccgggtgtgcctcaagttgccgtctttgatacagcgttccaccagaagatgccggagaaagcctatttgtacgcaatcccctatgagtactacgagaaatataaaattcgccgctatgggtttcatggaacctcacatcgttatgtgagtaaacgtgctgcggaaattatgggcaaaccgtacgatcagctcaagatcattaccgttcacgtgggtaacggcgcatcagttgcggcggtgaagaatggcgtatctgttgacacttccatgggtttcacaccacttgaaggtcttgtcatgggcacgcgcagcggcgatattgatccggccatcgtggaatttcttgagaaagaagaaggattgtcggccaaagaagtcgtcaacatcctcaacaagaaatctggtgtgtatgggctcaccaaaggctttagtagtgacatgcgtgacattgaagataatgctattgaaggtgatcctgtatgccgccttgcattagatgtgtacgaatatcgtatcgcgaaatatattggcgcatacgctgcggccatgaacggtgttgacgcgatcgtctttaccgcaggagttggcgaaaatagcccgattatgcgcgaagaaattattgagaactacttgggctacttagggatcaagatcgataaagaagccaatgacttcaaaggtgaggagaagatcatttcaacgcccgattccaaagtgattgcgatggtagttccgaccaacgaggagctcatgatcgccaaagacacgaaagaaatcattgagaaagggttggacgagcttaagatc

SEQ ID NO: 452 - protein, 417 aa, synthetic construct
  REGION 1..417: note = Variant of acetate kinase
MHHHHHHGGSGMKVLVINSGSSSIKYQLLDMTNEKVLAKGLVERIGIDGSRIVHKVNGEKHVLESEIKNHEIGLKLVLDLLTDEKYGVLKDLKEIDAVGHRVVHGGERFASSVKITDEVLKTIETLSFLAPLHNPANIMGIKSSMKVLPGVPQVAVFDTAFHQKMPEKAYLYAIPYEYYEKYKIRRYGFHGTSHRYVSKRAAEIMGKPYDQLKIITVHVGNGASVAAVKNGVSVDTSMGFTPLEGLVMGTRSGDIDPAIVEFLEKEEGLSAKEVVNILNKKSGVYGLTKGFSSDMRDIEDNAIEGDPVCRLALDVYEYRIAKYIGAYAAAMNGVDAIVFTAGVGENSPIMREEIIENYLGYLGIKIDKEANDFKGEEKIISTPDSKVIAMVVPTNEELMIAKDTKEIIEKGLDELKI

SEQ ID NO: 453 - DNA, 1251 bp, synthetic construct
  misc_feature 1..1251: note = Variant of acetate kinase
  source 1..1251: mol_type = other DNA
atgcaccatcatcatcatcatggcggtagcggcatgaaagttctggtgattaattctggtagctcctccatcaaatatcagctcctcgatatgaccaacgaaaaggtattagcgaaaggcttggtcgagcgcattggcatcgacggttcgcgtatcgtgcataaagttaacggcgaaaaacacgtgctggaacatgagattgcgaatcacgaaattggacttaaattggtcctggatcttcttacggacgaaaaatacggtgtgttgaaggatctcaaagaaatcgatgcagttgggcatcgcgtagtacatggcggcgagcgttttgccagtagcgtgaagattactgacgaagtcttaaagaccatcgagacgttgtcgttcttagctccgttacacaatccagcgaacattatgggtatcaagagcagcatgaaagtgttaccgggtgtgcctcaagttgccgtctttgatacagcgttccaccagaagatgccggagaaagcctatttgtacgcaatcccctatgagtactacgagaaatataaaattcgccgctatgggtttcatggaacctcacatcgttatgtgagtaaacgtgctgcggaaattatgggcaaaccgtacgatcagctcaagatcattaccgttcacgtgggtaacggcgcatcagttgcggcggtgaagaatggcgtatctgttgacacttccatgggtttcacaccacttgaaggtcttgtcatgggcacgcgcagcggcgatattgatccggccatcgtggaatttcttgagaaagaagaaggattgtcggccaaagaagtcgtcaacatcctcaacaagaaatctggtgtgtatgggctcaccaaaggctttagtagtgacatgcgtgacattgaagataatgctattgaaggtgatcctgtatgccgccttgcattagatgtgtacgaatatcgtatcgcgaaatatattggcgcatacgctgcggccatgaacggtgttgacgcgatcgtctttaccgcaggagttggcgaaaatagcccgattatgcgcgaagaaattattgagaactacttgggctacttagggatcaagatcgataaagaagccaatgacttcaaaggtgaggagaagatcatttcaacgcccgattccaaagtgattgcgatggtagttccgaccaacgaggagctcatgatcgccaaagacacgaaagaaatcattgagaaagggttggacgagcttaagatc

SEQ ID NO: 454 - protein, 417 aa, synthetic construct
  REGION 1..417: note = Variant of acetate kinase
MHHHHHHGGSGMKVLVINSGSSSIKYQLLDMTNEKVLAKGLVERIGIDGSRIVHKVNGEKHVLEHEIANHEIGLKLVLDLLTDEKYGVLKDLKEIDAVGHRVVHGGERFASSVKITDEVLKTIETLSFLAPLHNPANIMGIKSSMKVLPGVPQVAVFDTAFHQKMPEKAYLYAIPYEYYEKYKIRRYGFHGTSHRYVSKRAAEIMGKPYDQLKIITVHVGNGASVAAVKNGVSVDTSMGFTPLEGLVMGTRSGDIDPAIVEFLEKEEGLSAKEVVNILNKKSGVYGLTKGFSSDMRDIEDNAIEGDPVCRLALDVYEYRIAKYIGAYAAAMNGVDAIVFTAGVGENSPIMREEIIENYLGYLGIKIDKEANDFKGEEKIISTPDSKVIAMVVPTNEELMIAKDTKEIIEKGLDELKI

SEQ ID NO: 455 - DNA, 1251 bp, synthetic construct
  misc_feature 1..1251: note = Variant of acetate kinase
  source 1..1251: mol_type = other DNA
atgcaccatcatcatcatcatggcggtagcggcatgaaagttctggtgattaattctggtagctcctccatcaaatatcagctcctcgatatgaccaacgaaaaggtattagcgaaaggcttggtcgagcgcattggcatcgacggttcgcgtatcgtgcataaagttaacggcgaaacgcacgtgctggaacatgagattaagaatcacgaaattggacttaaattggtcctggatcttcttacggacgaaaaatacggtgtgttgaaggatctcaaagaaatcgatgcagttgggcatcgcgtagtacatggcggcgagcgttttgccagtagcgtgaagattactgacgaagtcttaaagaccatcgagacgttgtcgttcttagctccgttacacaatccagcgaacattatgggtatcaagagcagcatgaaagtgttaccgggtgtgcctcaagttgccgtctttgatacagcgttccaccagaagatgccggagaaagcctatttgtacgcaatcccctatgagtactacgagaaatataaaattcgccgctatgggtttcatggaacctcacatcgttatgtgagtaaacgtgctgcggaaattatgggcaaaccgtacgatcagctcaagatcattaccgttcacgtgggtaacggcgcatcagttgcggcggtgaagaatggcgtatctgttgacacttccatgggtttcacaccacttgaaggtcttgtcatgggcacgcgcagcggcgatattgatccggccatcgtggaatttcttgagaaagaagaaggattgtcggccaaagaagtcgtcaacatcctcaacaagaaatctggtgtgtatgggctcaccaaaggctttagtagtgacatgcgtgacattgaagataatgctattgaaggtgatcctgtatgccgccttgcattagatgtgtacgaatatcgtatcgcgaaatatattggcgcatacgctgcggccatgaacggtgttgacgcgatcgtctttaccgcaggagttggcgaaaatagcccgattatgcgcgaagaaattattgagaactacttgggctacttagggatcaagatcgataaagaagccaatgacttcaaaggtgaggagaagatcatttcaacgcccgattccaaagtgattgcgatggtagttccgaccaacgaggagctcatgatcgccaaagacacgaaagaaatcattgagaaagggttggacgagcttaagatc

SEQ ID NO: 456 - protein, 417 aa, synthetic construct
  REGION 1..417: note = Variant of acetate kinase
MHHHHHHGGSGMKVLVINSGSSSIKYQLLDMTNEKVLAKGLVERIGIDGSRIVHKVNGETHVLEHEIKNHEIGLKLVLDLLTDEKYGVLKDLKEIDAVGHRVVHGGERFASSVKITDEVLKTIETLSFLAPLHNPANIMGIKSSMKVLPGVPQVAVFDTAFHQKMPEKAYLYAIPYEYYEKYKIRRYGFHGTSHRYVSKRAAEIMGKPYDQLKIITVHVGNGASVAAVKNGVSVDTSMGFTPLEGLVMGTRSGDIDPAIVEFLEKEEGLSAKEVVNILNKKSGVYGLTKGFSSDMRDIEDNAIEGDPVCRLALDVYEYRIAKYIGAYAAAMNGVDAIVFTAGVGENSPIMREEIIENYLGYLGIKIDKEANDFKGEEKIISTPDSKVIAMVVPTNEELMIAKDTKEIIEKGLDELKI

SEQ ID NO: 457 - DNA, 1251 bp, synthetic construct
  misc_feature 1..1251: note = Variant of acetate kinase
  source 1..1251: mol_type = other DNA
atgcaccatcatcatcatcatggcggtagcggcatgaaagttctggtgattaattctggtagctcctccatcaaatatcagctcctcgatatgaccaacgaaaaggtattagcgaaaggcttggtcgagcgcattggcatcgacggttcgcgtatcgtgcataaagttaacggcgaaaaacacgtgctggaacatgagattaagaatcacgaaattggacttaaattggtcctggatcttcttacggacgaaaaatacggtgtgttgaaggatctcaaagaaatcgatgcagttgggcatcgcgtagtacatggcggcgagcgttttgccagtagcgtgaagattactgacgaagtcttaaagaccatcgagacgttgtcgttcttagctccgttacacaatccagcgaacattatgggtatcaagagcagcatgaaagtgttaccgggtgtgcctcaagttgccgtctttgatacagcgttccaccagaagatgccggagaaagcctatttgtacgcaatcccctatgagtactacgagaaatataaaattcgccgctatgggtttcatggaacctcacatcgttatgtgagtaaacgtgctgcggaaattatgggcaaaccgtacgatcagctcaagatcattaccgttcacgtgggtaacggcgcatcagttgcggcggtgaagaatggcgtatctgttgacacttccatgggtttcacaccacttgaaggtcttgtcatgggcacgcgcagcggcgatattgatccggccatcgtggaatttcttgagaaagaagaaggattgtcggccaaagaagtcgtcaacatcctcaacaagaaatctggtgtgtatgggctcaccaaaggctttagtagtgacatgcgtgacattgaagatcatgctattgaaggtgatcctgtatgccgccttgcattagatgtgtacgaatatcgtatcgcgaaatatattggcgcatacgctgcggccatgaacggtgttgacgcgatcgtctttaccgcaggagttggcgaaaatagcccgattatgcgcgaagaaattattgagaactacttgggctacttagggatcaagatcgataaagaagccaatgacttcaaaggtgaggagaagatcatttcaacgcccgattccaaagtgattgcgatggtagttccgaccaacgaggagctcatgatcgccaaagacacgaaagaaatcattgagaaagggttggacgagcttaagatc

SEQ ID NO: 458 - protein, 417 aa, synthetic construct
  REGION 1..417: note = Variant of acetate kinase
MHHHHHHGGSGMKVLVINSGSSSIKYQLLDMTNEKVLAKGLVERIGIDGSRIVHKVNGEKHVLEHEIKNHEIGLKLVLDLLTDEKYGVLKDLKEIDAVGHRVVHGGERFASSVKITDEVLKTIETLSFLAPLHNPANIMGIKSSMKVLPGVPQVAVFDTAFHQKMPEKAYLYAIPYEYYEKYKIRRYGFHGTSHRYVSKRAAEIMGKPYDQLKIITVHVGNGASVAAVKNGVSVDTSMGFTPLEGLVMGTRSGDIDPAIVEFLEKEEGLSAKEVVNILNKKSGVYGLTKGFSSDMRDIEDHAIEGDPVCRLALDVYEYRIAKYIGAYAAAMNGVDAIVFTAGVGENSPIMREEIIENYLGYLGIKIDKEANDFKGEEKIISTPDSKVIAMVVPTNEELMIAKDTKEIIEKGLDELKI

SEQ ID NO: 459 - DNA, 1251 bp, synthetic construct
  misc_feature 1..1251: note = Variant of acetate kinase
  source 1..1251: mol_type = other DNA
atgcaccatcatcatcatcatggcggtagcggcatgaaagttctggtgattaattctggtagctcctccatcaaatatcagctcctcgatatgaccaacgaaaaggtattagcgaaaggcttggtcgagcgcattggcatcgacggttcgcgtatcgtgcataaagttaacggcgaaagtcacgtgctggaacatgagattaagaatcacgaaattggacttaaattggtcctggatcttcttacggacgaaaaatacggtgtgttgaaggatctcaaagaaatcgatgcagttgggcatcgcgtagtacatggcggcgagcgttttgccagtagcgtgaagattactgacgaagtcttaaagaccatcgagacgttgtcgttcttagctccgttacacaatccagcgaacattatgggtatcaagagcagcatgaaagtgttaccgggtgtgcctcaagttgccgtctttgatacagcgttccaccagaagatgccggagaaagcctatttgtacgcaatcccctatgagtactacgagaaatataaaattcgccgctatgggtttcatggaacctcacatcgttatgtgagtaaacgtgctgcggaaattatgggcaaaccgtacgatcagctcaagatcattaccgttcacgtgggtaacggcgcatcagttgcggcggtgaagaatggcgtatctgttgacacttccatgggtttcacaccacttgaaggtcttgtcatgggcacgcgcagcggcgatattgatccggccatcgtggaatttcttgagaaagaagaaggattgtcggccaaagaagtcgtcaacatcctcaacaagaaatctggtgtgtatgggctcaccaaaggctttagtagtgacatgcgtgacattgaagataatgctattgaaggtgatcctgtatgccgccttgcattagatgtgtacgaatatcgtatcgcgaaatatattggcgcatacgctgcggccatgaacggtgttgacgcgatcgtctttaccgcaggagttggcgaaaatagcccgattatgcgcgaagaaattattgagaactacttgggctacttagggatcaagatcgataaagaagccaatgacttcaaaggtgaggagaagatcatttcaacgcccgattccaaagtgattgcgatggtagttccgaccaacgaggagctcatgatcgccaaagacacgaaagaaatcattgagaaagggttggacgagcttaagatc

SEQ ID NO: 460 - protein, 417 aa, synthetic construct
  REGION 1..417: note = Variant of acetate kinase
MHHHHHHGGSGMKVLVINSGSSSIKYQLLDMTNEKVLAKGLVERIGIDGSRIVHKVNGESHVLEHEIKNHEIGLKLVLDLLTDEKYGVLKDLKEIDAVGHRVVHGGERFASSVKITDEVLKTIETLSFLAPLHNPANIMGIKSSMKVLPGVPQVAVFDTAFHQKMPEKAYLYAIPYEYYEKYKIRRYGFHGTSHRYVSKRAAEIMGKPYDQLKIITVHVGNGASVAAVKNGVSVDTSMGFTPLEGLVMGTRSGDIDPAIVEFLEKEEGLSAKEVVNILNKKSGVYGLTKGFSSDMRDIEDNAIEGDPVCRLALDVYEYRIAKYIGAYAAAMNGVDAIVFTAGVGENSPIMREEIIENYLGYLGIKIDKEANDFKGEEKIISTPDSKVIAMVVPTNEELMIAKDTKEIIEKGLDELKI

SEQ ID NO: 461 - DNA, 1251 bp, synthetic construct
  misc_feature 1..1251: note = Variant of acetate kinase
  source 1..1251: mol_type = other DNA
atgcaccatcatcatcatcatggcggtagcggcatgaaagttctggtgattaattctggtagctcctccatcaaatatcagctcctcgatatgaccaacgaaaaggtattagcgaaaggcttggtcgagcgcattggcatcgacggttcgcgtatcgtgcataaagttaacggcgaaaaacacgtgctggaagcggagattaagaatcacgaaattggacttaaattggtcctggatcttcttacggacgaaaaatacggtgtgttgaaggatctcaaagaaatcgatgcagttgggcatcgcgtagtacatggcggcgagcgttttgccagtagcgtgaagattactgacgaagtcttaaagaccatcgagacgttgtcgttcttagctccgttacacaatccagcgaacattatgggtatcaagagcagcatgaaagtgttaccgggtgtgcctcaagttgccgtctttgatacagcgttccaccagaagatgccggagaaagcctatttgtacgcaatcccctatgagtactacgagaaatataaaattcgccgctatgggtttcatggaacctcacatcgttatgtgagtaaacgtgctgcggaaattatgggcaaaccgtacgatcagctcaagatcattaccgttcacgtgggtaacggcgcatcagttgcggcggtgaagaatggcgtatctgttgacacttccatgggtttcacaccacttgaaggtcttgtcatgggcacgcgcagcggcgatattgatccggccatcgtggaatttcttgagaaagaagaaggattgtcggccaaagaagtcgtcaacatcctcaacaagaaatctggtgtgtatgggctcaccaaaggctttagtagtgacatgcgtgacattgaagataatgctattgaaggtgatcctgtatgccgccttgcattagatgtgtacgaatatcgtatcgcgaaatatattggcgcatacgctgcggccatgaacggtgttgacgcgatcgtctttaccgcaggagttggcgaaaatagcccgattatgcgcgaagaaattattgagaactacttgggctacttagggatcaagatcgataaagaagccaatgacttcaaaggtgaggagaagatcatttcaacgcccgattccaaagtgattgcgatggtagttccgaccaacgaggagctcatgatcgccaaagacacgaaagaaatcattgagaaagggttggacgagcttaagatc

SEQ ID NO: 462 - protein, 417 aa, synthetic construct
  REGION 1..417: note = Variant of acetate kinase
MHHHHHHGGSGMKVLVINSGSSSIKYQLLDMTNEKVLAKGLVERIGIDGSRIVHKVNGEKHVLEAEIKNHEIGLKLVLDLLTDEKYGVLKDLKEIDAVGHRVVHGGERFASSVKITDEVLKTIETLSFLAPLHNPANIMGIKSSMKVLPGVPQVAVFDTAFHQKMPEKAYLYAIPYEYYEKYKIRRYGFHGTSHRYVSKRAAEIMGKPYDQLKIITVHVGNGASVAAVKNGVSVDTSMGFTPLEGLVMGTRSGDIDPAIVEFLEKEEGLSAKEVVNILNKKSGVYGLTKGFSSDMRDIEDNAIEGDPVCRLALDVYEYRIAKYIGAYAAAMNGVDAIVFTAGVGENSPIMREEIIENYLGYLGIKIDKEANDFKGEEKIISTPDSKVIAMVVPTNEELMIAKDTKEIIEKGLDELKI

SEQ ID NO: 463 - DNA, 1251 bp, synthetic construct
  misc_feature 1..1251: note = Variant of acetate kinase
  source 1..1251: mol_type = other DNA
atgcaccatcatcatcatcatggcggtagcggcatgaaagttctggtgattaattctggtagctcctccatcaaatatcagctcctcgatatgaccaacgaaaaggtattagcgaaaggcttggtcgagcgcattggcatcgacggttcgcgtatcgtgcatagtgttaacggcgaaaaacacgtgctggaacatgagattaagaatcacgaaattggacttaaattggtcctggatcttcttacggacgaaaaatacggtgtgttgaaggatctcaaagaaatcgatgcagttgggcatcgcgtagtacatggcggcgagcgttttgccagtagcgtgaagattactgacgaagtcttaaagaccatcgagacgttgtcgttcttagctccgttacacaatccagcgaacattatgggtatcaagagcagcatgaaagtgttaccgggtgtgcctcaagttgccgtctttgatacagcgttccaccagaagatgccggagaaagcctatttgtacgcaatcccctatgagtactacgagaaatataaaattcgccgctatgggtttcatggaacctcacatcgttatgtgagtaaacgtgctgcggaaattatgggcaaaccgtacgatcagctcaagatcattaccgttcacgtgggtaacggcgcatcagttgcggcggtgaagaatggcgtatctgttgacacttccatgggtttcacaccacttgaaggtcttgtcatgggcacgcgcagcggcgatattgatccggccatcgtggaatttcttgagaaagaagaaggattgtcggccaaagaagtcgtcaacatcctcaacaagaaatctggtgtgtatgggctcaccaaaggctttagtagtgacatgcgtgacattgaagataatgctattgaaggtgatcctgtatgccgccttgcattagatgtgtacgaatatcgtatcgcgaaatatattggcgcatacgctgcggccatgaacggtgttgacgcgatcgtctttaccgcaggagttggcgaaaatagcccgattatgcgcgaagaaattattgagaactacttgggctacttagggatcaagatcgataaagaagccaatgacttcaaaggtgaggagaagatcatttcaacgcccgattccaaagtgattgcgatggtagttccgaccaacgaggagctcatgatcgccaaagacacgaaagaaatcattgagaaagggttggacgagcttaagatc

SEQ ID NO: 464 - protein, 417 aa, synthetic construct
  REGION 1..417: note = Variant of acetate kinase
MHHHHHHGGSGMKVLVINSGSSSIKYQLLDMTNEKVLAKGLVERIGIDGSRIVHSVNGEKHVLEHEIKNHEIGLKLVLDLLTDEKYGVLKDLKEIDAVGHRVVHGGERFASSVKITDEVLKTIETLSFLAPLHNPANIMGIKSSMKVLPGVPQVAVFDTAFHQKMPEKAYLYAIPYEYYEKYKIRRYGFHGTSHRYVSKRAAEIMGKPYDQLKIITVHVGNGASVAAVKNGVSVDTSMGFTPLEGLVMGTRSGDIDPAIVEFLEKEEGLSAKEVVNILNKKSGVYGLTKGFSSDMRDIEDNAIEGDPVCRLALDVYEYRIAKYIGAYAAAMNGVDAIVFTAGVGENSPIMREEIIENYLGYLGIKIDKEANDFKGEEKIISTPDSKVIAMVVPTNEELMIAKDTKEIIEKGLDELKI

SEQ ID NO: 465 - DNA, 1251 bp, synthetic construct
  misc_feature 1..1251: note = Variant of acetate kinase
  source 1..1251: mol_type = other DNA
atgcaccatcatcatcatcatggcggtagcggcatgaaagttctggtgattaattctggtagctcctccatcaaatatcagctcctcgatatgaccaacgaaaaggtattagcgaaaggcttggtcgagcgcattggcatcgacggttcgcgtatcgtgcataaagttaacggcgaaaaacacgtgctggaacatgagattaagaatcacgaaattggacttaaattggtcctggatcttcttacggacgaaaaatacggtgtgttgaaggatctcaaagaaatcgatgcagttgggcatcgcgtagtacatggcggcgagcgttttgccagtagcgtgaagattactgacgaagtcttaaagaccatcgagacgttgtcgttcttagctccgttacacaatccagcgaacattatgggtatcaagagcagcatgaaagtgttaccgggtgtgcctcaagttgccgtctttgatacagcgttccaccagaagatgccggagaaagcctatttgtacgcaatcccctatgagtactacgagaaatataaaattcgccgctatgggtttcatggaacctcacatcgttatgtgagtaaacgtgctgcggaaattatgggcaaaccgtacgatcagctcaagatcattaccgttcacgtgggtaacggcgcatcagttgcggcggtgaagaatggcgtatctgttgacacttccatgggtttcacaccacttgaaggtcttgtcatgggcacgcgcagcggcgatattgatccggccatcgtggaatttcttgagaaagaagaaggattgtcggccaaagaagtcgtcaacatcctcaacaagaaatctggtgtgtatgggctcaccaaaggctttagtagtgacatgcgtgacattgaagatcgggctattgaaggtgatcctttatgccgccttgcattagatgtgtacgaatatcgtatcgcgaaatatattggcgcatacgctgcggccatgaacggtgttgacgcgatcgtctttaccgcaggagttggcgaaaatagcccgattatgcgcgaagaaattattgagaactacttgggctacttagggatcaagatcgataaagaagccaatgacttcaaaggtgaggagaagatcatttcaacgcccgattccaaagtgattgcgatggtagttccgaccaacgaggagctcatgatcgccaaagacacgaaagaaatcattgagaaagggttggacgagcttaagatc

SEQ ID NO: 466 - protein, 417 aa, synthetic construct
  REGION 1..417: note = Variant of acetate kinase
MHHHHHHGGSGMKVLVINSGSSSIKYQLLDMTNEKVLAKGLVERIGIDGSRIVHKVNGEKHVLEHEIKNHEIGLKLVLDLLTDEKYGVLKDLKEIDAVGHRVVHGGERFASSVKITDEVLKTIETLSFLAPLHNPANIMGIKSSMKVLPGVPQVAVFDTAFHQKMPEKAYLYAIPYEYYEKYKIRRYGFHGTSHRYVSKRAAEIMGKPYDQLKIITVHVGNGASVAAVKNGVSVDTSMGFTPLEGLVMGTRSGDIDPAIVEFLEKEEGLSAKEVVNILNKKSGVYGLTKGFSSDMRDIEDRAIEGDPLCRLALDVYEYRIAKYIGAYAAAMNGVDAIVFTAGVGENSPIMREEIIENYLGYLGIKIDKEANDFKGEEKIISTPDSKVIAMVVPTNEELMIAKDTKEIIEKGLDELKI

SEQ ID NO: 467 - DNA, 1251 bp, synthetic construct
  misc_feature 1..1251: note = Variant of acetate kinase
  source 1..1251: mol_type = other DNA
atgcaccatcatcatcatcatggcggtagcggcatgaaagttctggtgattaattctggtagctcctccatcaaatatcagctcctcgatatgaccaacgaaaaggtattagcgaaaggcttggtcgagcgcattggcatcgacggttcgcgtatcgtgcataaagttaacggcgaaaaacacgtgctggaacatgagattaagaatcacgaaattggacttaaattggtcctggatcttcttacggacgaaaaatacggtgtgttgaaggatctcaaagaaatcgatgcagttgggcatcgcgtagtacatggcggcgagcgttttaagagtagcgtgaagattactgacgaagtcttaaagaccatcgagacgttgtcgttcttagctccgttacacaatccagcgaacattatgggtatcaagagcagcatgaaagtgttaccgggtgtgcctcaagttgccgtctttgatacagcgttccaccagaagatgccggagaaagcctatttgtacgcaatcccctatgagtactacgagaaatataaaattcgccgctatgggtttcatggaacctcacatcgttatgtgagtaaacgtgctgcggaaattatgggcaaaccgtacgatcagctcaagatcattaccgttcacgtgggtaacggcgcatcagttgcggcggtgaagaatggcgtatctgttgacacttccatgggtttcacaccacttgaaggtcttgtcatgggcacgcgcagcggcgatattgatccggccatcgtggaatttcttgagaaagaagaaggattgtcggccaaagaagtcgtcaacatcctcaacaagaaatctggtgtgtatgggctcaccaaaggctttagtagtgacatgcgtgacattgaagataatgctattgaaggtgatcctgtatgccgccttgcattagatgtgtacgaatatcgtatcgcgaaatatattggcgcatacgctgcggccatgaacggtgttgacgcgatcgtctttaccgcaggagttggcgaaaatagcccgattatgcgcgaagaaattattgagaactacttgggctacttagggatcaagatcgataaagaagccaatgacttcaaaggtgaggagaagatcatttcaacgcccgattccaaagtcattgcgatggtagttccgaccaacgaggagctcatgatcgccaaagacacgaaagaaatcattgagaaagggttggacgagcttaagatc

SEQ ID NO: 468 - protein, 417 aa, synthetic construct
  REGION 1..417: note = Variant of acetate kinase
MHHHHHHGGSGMKVLVINSGSSSIKYQLLDMTNEKVLAKGLVERIGIDGSRIVHKVNGEKHVLEHEIKNHEIGLKLVLDLLTDEKYGVLKDLKEIDAVGHRVVHGGERFKSSVKITDEVLKTIETLSFLAPLHNPANIMGIKSSMKVLPGVPQVAVFDTAFHQKMPEKAYLYAIPYEYYEKYKIRRYGFHGTSHRYVSKRAAEIMGKPYDQLKIITVHVGNGASVAAVKNGVSVDTSMGFTPLEGLVMGTRSGDIDPAIVEFLEKEEGLSAKEVVNILNKKSGVYGLTKGFSSDMRDIEDNAIEGDPVCRLALDVYEYRIAKYIGAYAAAMNGVDAIVFTAGVGENSPIMREEIIENYLGYLGIKIDKEANDFKGEEKIISTPDSKVIAMVVPTNEELMIAKDTKEIIEKGLDELKI

SEQ ID NO: 469 - DNA, 1251 bp, synthetic construct
  misc_feature 1..1251: note = Variant of acetate kinase
  source 1..1251: mol_type = other DNA
atgcaccatcatcatcatcatggcggtagcggcatgaaagttctggtgattaattctggtagctcctccatcaaatatcagctcctcgatatgaccaacgaaaaggtattagcgaaaggcttggtcgagcgcattggcatcgacggttcgcgtatcgtgcataaagttaacggcgaaaaacacgtgctggaacatgagattaagaatcacgaaattggacttaaattggtcctggatcttcttacggacgaaaaatacggtgtgttgaaggatctcaaagaaatcgatgcagttgggcatcgcgtagtacatggcggcgagcgttttgccagtagcgtgaagattactgacgaagtcttaaagaccatcgagacgttgtcgttcttagctccgttacacaatccagcgaacattgagggtatcaagagcagcatgaaagtgttaccgggtgtgcctcaagttgccgtctttgatacagcgttccaccagaagatgccggagaaagcctatttgtacgcaatcccctatgagtactacgagaaatataaaattcgccgctatgggtttcatggaacctcacatcgttatgtgagtaaacgtgctgcggaaattatgggcaaaccgtacgatcagctcaagatcattaccgttcacgtgggtaacggcgcatcagttgcggcggtgaagaatggcgtatctgttgacacttccatgggtttcacaccacttgaaggtcttgtcatgggcacgcgcagcggcgatattgatccggccatcgtggaatttcttgagaaagaagaaggattgtcggccaaagaagtcgtcaacatcctcaacaagaaatctggtgtgtatgggctcaccaaaggctttagtagtgacatgcgtgacattgaagataatgctattgaaggtgatcctgtatgccgccttgcattagatgtgtacgaatatcgtatcgcgaaatatattggcgcatacgctgcggccatgaacggtgttgacgcgatcgtctttaccgcaggagttggcgaaaatagcccgattatgcgcgaagaaattattgagaactacttgggctacttagggatcaagatcgataaagaagccaatgacttcaaaggtgaggagaagatcatttcaacgcccgattccaaagtgattgcgatggtagttccgaccaacgaggagctcatgatcgccaaagacacgaaagaaatcattgagaaagggttggacgagcttaagatc

SEQ ID NO: 470 - protein, 417 aa, synthetic construct
  REGION 1..417: note = Variant of acetate kinase
MHHHHHHGGSGMKVLVINSGSSSIKYQLLDMTNEKVLAKGLVERIGIDGSRIVHKVNGEKHVLEHEIKNHEIGLKLVLDLLTDEKYGVLKDLKEIDAVGHRVVHGGERFASSVKITDEVLKTIETLSFLAPLHNPANIEGIKSSMKVLPGVPQVAVFDTAFHQKMPEKAYLYAIPYEYYEKYKIRRYGFHGTSHRYVSKRAAEIMGKPYDQLKIITVHVGNGASVAAVKNGVSVDTSMGFTPLEGLVMGTRSGDIDPAIVEFLEKEEGLSAKEVVNILNKKSGVYGLTKGFSSDMRDIEDNAIEGDPVCRLALDVYEYRIAKYIGAYAAAMNGVDAIVFTAGVGENSPIMREEIIENYLGYLGIKIDKEANDFKGEEKIISTPDSKVIAMVVPTNEELMIAKDTKEIIEKGLDELKI

SEQ ID NO: 471 - DNA, 1251 bp, synthetic construct
  misc_feature 1..1251: note = Variant of acetate kinase
  source 1..1251: mol_type = other DNA
atgcaccatcatcatcatcatggcggtagcggcatgaaagttctggtgattaattctggtagctcctccatcaaatatcagctcctcgatatgaccaacgaaaaggtattagcgaaaggcttggtcgagcgcattggcatcgacggttcgcgtatcgtgcataaagttaacggcgaaaaacacgtgctggaacatgagattccgaatcacgaaattggacttaaattggtcctggatcttcttacggacgaaaaatacggtgtgttgaaggatctcaaagaaatcgatgcagttgggcatcgcgtagtacatggcggcgagcgttttgccagtagcgtgaagattactgacgaagtcttaaagaccatcgagacgttgtcgttcttagctccgttacacaatccagcgaacattatgggtatcaagagcagcatgaaagtgttaccgggtgtgcctcaagttgccgtctttgatacagcgttccaccagaagatgccggagaaagcctatttgtacgcaatcccctatgagtactacgagaaatataaaattcgccgctatgggtttcatggaacctcacatcgttatgtgagtaaacgtgctgcggaaattatgggcaaaccgtacgatcagctcaagatcattaccgttcacgtgggtaacggcgcatcagttgcggcggtgaagaatggcgtatctgttgacacttccatgggtttcacaccacttgaaggtcttgtcatgggcacgcgcagcggcgatattgatccggccatcgtggaatttcttgagaaagaagaaggattgtcggccaaagaagtcgtcaacatcctcaacaagaaatctggtgtgtatgggctcaccaaaggctttagtagtgacatgcgtgacattgaagataatgctattgaaggtgatcctgtatgccgccttgcattagatgtgtacgaatatcgtatcgcgaaatatattggcgcatacgctgcggccatgaacggtgttgacgcgatcgtctttaccgcaggagttggcgaaaatagcccgattatgcgcgaagaaattattgagaactacttgggctacttagggatcaagatcgataaagaagccaatgacttcaaaggtgaggagaagatcatttcaacgcccgattccaaagtgattgcgatggtagttccgaccaacgaggagctcatgatcgccaaagacacgaaagaaatcattgagaaagggttggacgagcttaagatc

SEQ ID NO: 472 - protein, 417 aa, synthetic construct
  REGION 1..417: note = Variant of acetate kinase
MHHHHHHGGSGMKVLVINSGSSSIKYQLLDMTNEKVLAKGLVERIGIDGSRIVHKVNGEKHVLEHEIPNHEIGLKLVLDLLTDEKYGVLKDLKEIDAVGHRVVHGGERFASSVKITDEVLKTIETLSFLAPLHNPANIMGIKSSMKVLPGVPQVAVFDTAFHQKMPEKAYLYAIPYEYYEKYKIRRYGFHGTSHRYVSKRAAEIMGKPYDQLKIITVHVGNGASVAAVKNGVSVDTSMGFTPLEGLVMGTRSGDIDPAIVEFLEKEEGLSAKEVVNILNKKSGVYGLTKGFSSDMRDIEDNAIEGDPVCRLALDVYEYRIAKYIGAYAAAMNGVDAIVFTAGVGENSPIMREEIIENYLGYLGIKIDKEANDFKGEEKIISTPDSKVIAMVVPTNEELMIAKDTKEIIEKGLDELKI

SEQ ID NO: 473 - DNA, 1251 bp, synthetic construct
  misc_feature 1..1251: note = Variant of acetate kinase
  source 1..1251: mol_type = other DNA
atgcaccatcatcatcatcatggcggtagcggcatgaaagttctggtgattaattctggtagctcctccatcaaatatcagctcctcgatatgaccaacgaaaaggtattagcgaaaggcttggtcgagcgcattggcatcgacggttcgcgtatcgtgcatgaggttaacggcgaaaaacacgtgctggaacatgagattaagaatcacgaaattggacttaaattggtcctggatcttcttacggacgaaaaatacggtgtgttgaaggatctcaaagaaatcgatgcagttgggcatcgcgtagtacatggcggcgagcgttttgccagtagcgtgaagattactgacgaagtcttaaagaccatcgagacgttgtcgttcttagctccgttacacaatccagcgaacattatgggtatcaagagcagcatgaaagtgttaccgggtgtgcctcaagttgccgtctttgatacagcgttccaccagaagatgccggagaaagcctatttgtacgcaatcccctatgagtactacgagaaatataaaattcgccgctatgggtttcatggaacctcacatcgttatgtgagtaaacgtgctgcggaaattatgggcaaaccgtacgatcagctcaagatcattaccgttcacgtgggtaacggcgcatcagttgcggcggtgaagaatggcgtatctgttgacacttccatgggtttcacaccacttgaaggtcttgtcatgggcacgcgcagcggcgatattgatccggccatcgtggaatttcttgagaaagaagaaggattgtcggccaaagaagtcgtcaacatcctcaacaagaaatctggtgtgtatgggctcaccaaaggctttagtagtgacatgcgtgacattgaagataatgctattgaaggtgatcctgtatgccgccttgcattagatgtgtacgaatatcgtatcgcgaaatatattggcgcatacgctgcggccatgaacggtgttgacgcgatcgtctttaccgcaggagttggcgaaaatagcccgattatgcgcgaagaaattattgagaactacttgggctacttagggatcaagatcgataaagaagccaatgacttcaaaggtgaggagaagatcatttcaacgcccgattccaaagtgattgcgatggtagttccgaccaacgaggagctcatgatcgccaaagacacgaaagaaatcattgagaaagggttggacgagcttaagatc

SEQ ID NO: 474 - protein, 417 aa, synthetic construct
  REGION 1..417: note = Variant of acetate kinase
MHHHHHHGGSGMKVLVINSGSSSIKYQLLDMTNEKVLAKGLVERIGIDGSRIVHEVNGEKHVLEHEIKNHEIGLKLVLDLLTDEKYGVLKDLKEIDAVGHRVVHGGERFASSVKITDEVLKTIETLSFLAPLHNPANIMGIKSSMKVLPGVPQVAVFDTAFHQKMPEKAYLYAIPYEYYEKYKIRRYGFHGTSHRYVSKRAAEIMGKPYDQLKIITVHVGNGASVAAVKNGVSVDTSMGFTPLEGLVMGTRSGDIDPAIVEFLEKEEGLSAKEVVNILNKKSGVYGLTKGFSSDMRDIEDNAIEGDPVCRLALDVYEYRIAKYIGAYAAAMNGVDAIVFTAGVGENSPIMREEIIENYLGYLGIKIDKEANDFKGEEKIISTPDSKVIAMVVPTNEELMIAKDTKEIIEKGLDELKI

SEQ ID NO: 475 - DNA, 1251 bp, synthetic construct
  misc_feature 1..1251: note = Variant of acetate kinase
  source 1..1251: mol_type = other DNA
atgcaccatcatcatcatcatggcggtagcggcatgaaagttctggtgattaattctggtagctcctccatcaaatatcagctcctcgatatgaccaacgaaaaggtattagcgaaaggcttggtcgagcgcattggcatcgacggttcgcgtatcgtgcatacggttaacggcgaaaaacacgtgctggaacatgagattaagaatcacgaaattggacttaaattggtcctggatcttcttacggacgaaaaatacggtgtgttgaaggatctcaaagaaatcgatgcagttgggcatcgcgtagtacatggcggcgagcgttttgccagtagcgtgaagattactgacgaagtcttaaagaccatcgagacgttgtcgttcttagctccgttacacaatccagcgaacattatgggtatcaagagcagcatgaaagtgttaccgggtgtgcctcaagttgccgtctttgatacagcgttccaccagaagatgccggagaaagcctatttgtacgcaatcccctatgagtactacgagaaatataaaattcgccgctatgggtttcatggaacctcacatcgttatgtgagtaaacgtgctgcggaaattatgggcaaaccgtacgatcagctcaagatcattaccgttcacgtgggtaacggcgcatcagttgcggcggtgaagaatggcgtatctgttgacacttccatgggtttcacaccacttgaaggtcttgtcatgggcacgcgcagcggcgatattgatccggccatcgtggaatttcttgagaaagaagaaggattgtcggccaaagaagtcgtcaacatcctcaacaagaaatctggtgtgtatgggctcaccaaaggctttagtagtgacatgcgtgacattgaagataatgctattgaaggtgatcctgtatgccgccttgcattagatgtgtacgaatatcgtatcgcgaaatatattggcgcatacgctgcggccatgaacggtgttgacgcgatcgtctttaccgcaggagttggcgaaaatagcccgattatgcgcgaagaaattattgagaactacttgggctacttagggatcaagatcgataaagaagccaatgacttcaaaggtgaggagaagatcatttcaacgcccgattccaaagtgattgcgatggtagttccgaccaacgaggagctcatgatcgccaaagacacgaaagaaatcattgagaaagggttggacgagcttaagatc

SEQ ID NO: 476 - protein, 417 aa, synthetic construct
  REGION 1..417: note = Variant of acetate kinase
MHHHHHHGGSGMKVLVINSGSSSIKYQLLDMTNEKVLAKGLVERIGIDGSRIVHTVNGEKHVLEHEIKNHEIGLKLVLDLLTDEKYGVLKDLKEIDAVGHRVVHGGERFASSVKITDEVLKTIETLSFLAPLHNPANIMGIKSSMKVLPGVPQVAVFDTAFHQKMPEKAYLYAIPYEYYEKYKIRRYGFHGTSHRYVSKRAAEIMGKPYDQLKIITVHVGNGASVAAVKNGVSVDTSMGFTPLEGLVMGTRSGDIDPAIVEFLEKEEGLSAKEVVNILNKKSGVYGLTKGFSSDMRDIEDNAIEGDPVCRLALDVYEYRIAKYIGAYAAAMNGVDAIVFTAGVGENSPIMREEIIENYLGYLGIKIDKEANDFKGEEKIISTPDSKVIAMVVPTNEELMIAKDTKEIIEKGLDELKI

SEQ ID NO: 477 - DNA, 1251 bp, synthetic construct
  misc_feature 1..1251: note = Variant of acetate kinase
  source 1..1251: mol_type = other DNA
atgcaccatcatcatcatcatggcggtagcggcatgaaagttctggtgattaattctggtagctcctccatcaaatatcagctcctcgatatgaccaacgaaaaggtattagcgaaaggcttggtcgagcgcattggcatcgacggttcgcgtatcgtgcataaagttaacggcgaaaaacacgtgctggaaagggagattaagaatcacgaaattggacttaaattggtcctggatcttcttacggacgaaaaatacggtgtgttgaaggatctcaaagaaatcgatgcagttgggcatcgcgtagtacatggcggcgagcgttttgccagtagcgtgaagattactgacgaagtcttaaagaccatcgagacgttgtcgttcttagctccgttacacaatccagcgaacattatgggtatcaagagcagcatgaaagtgttaccgggtgtgcctcaagttgccgtctttgatacagcgttccaccagaagatgccggagaaagcctatttgtacgcaatcccctatgagtactacgagaaatataaaattcgccgctatgggtttcatggaacctcacatcgttatgtgagtaaacgtgctgcggaaattatgggcaaaccgtacgatcagctcaagatcattaccgttcacgtgggtaacggcgcatcagttgcggcggtgaagaatggcgtatctgttgacacttccatgggtttcacaccacttgaaggtcttgtcatgggcacgcgcagcggcgatattgatccggccatcgtggaatttcttgagaaagaagaaggattgtcggccaaagaagtcgtcaacatcctcaacaagaaatctggtgtgtatgggctcaccaaaggctttagtagtgacatgcgtgacattgaagataatgctattgaaggtgatcctgtatgccgccttgcattagatgtgtacgaatatcgtatcgcgaaatatattggcgcatacgctgcggccatgaacggtgttgacgcgatcgtctttaccgcaggagttggcgaaaatagcccgattatgcgcgaagaaattattgagaactacttgggctacttagggatcaagatcgataaagaagccaatgacttcaaaggtgaggagaagatcatttcaacgcccgattccaaagtgattgcgatggtagttccgaccaacgaggagctcatgatcgccaaagacacgaaagaaatcattgagaaagggttggacgagcttaagatc

SEQ ID NO: 478 - protein, 417 aa, synthetic construct
  REGION 1..417: note = Variant of acetate kinase
MHHHHHHGGSGMKVLVINSGSSSIKYQLLDMTNEKVLAKGLVERIGIDGSRIVHKVNGEKHVLEREIKNHEIGLKLVLDLLTDEKYGVLKDLKEIDAVGHRVVHGGERFASSVKITDEVLKTIETLSFLAPLHNPANIMGIKSSMKVLPGVPQVAVFDTAFHQKMPEKAYLYAIPYEYYEKYKIRRYGFHGTSHRYVSKRAAEIMGKPYDQLKIITVHVGNGASVAAVKNGVSVDTSMGFTPLEGLVMGTRSGDIDPAIVEFLEKEEGLSAKEVVNILNKKSGVYGLTKGFSSDMRDIEDNAIEGDPVCRLALDVYEYRIAKYIGAYAAAMNGVDAIVFTAGVGENSPIMREEIIENYLGYLGIKIDKEANDFKGEEKIISTPDSKVIAMVVPTNEELMIAKDTKEIIEKGLDELKI

SEQ ID NO: 479 - DNA, 1251 bp, synthetic construct
  misc_feature 1..1251: note = Variant of acetate kinase
  source 1..1251: mol_type = other DNA
atgcaccatcatcatcatcatggcggtagcggcatgaaagttctggtgattaattctggtagctcctccatcaaatatcagctcctcgatatgaccaacgaaaaggtattagcgaaaggcttggtcgagcgcattggcatcgacggttcgcgtatcgtgcatgtggttaacggcgaaaaacacgtgctggaacatgagattaagaatcacgaaattggacttaaattggtcctggatcttcttacggacgaaaaatacggtgtgttgaaggatctcaaagaaatcgatgcagttgggcatcgcgtagtacatggcggcgagcgttttgccagtagcgtgaagattactgacgaagtcttaaagaccatcgagacgttgtcgttcttagctccgttacacaatccagcgaacattatgggtatcaagagcagcatgaaagtgttaccgggtgtgcctcaagttgccgtctttgatacagcgttccaccagaagatgccggagaaagcctatttgtacgcaatcccctatgagtactacgagaaatataaaattcgccgctatgggtttcatggaacctcacatcgttatgtgagtaaacgtgctgcggaaattatgggcaaaccgtacgatcagctcaagatcattaccgttcacgtgggtaacggcgcatcagttgcggcggtgaagaatggcgtatctgttgacacttccatgggtttcacaccacttgaaggtcttgtcatgggcacgcgcagcggcgatattgatccggccatcgtggaatttcttgagaaagaagaaggattgtcggccaaagaagtcgtcaacatcctcaacaagaaatctggtgtgtatgggctcaccaaaggctttagtagtgacatgcgtgacattgaagataatgctattgaaggtgatcctgtatgccgccttgcattagatgtgtacgaatatcgtatcgcgaaatatattggcgcatacgctgcggccatgaacggtgttgacgcgatcgtctttaccgcaggagttggcgaaaatagcccgattatgcgcgaagaaattattgagaactacttgggctacttagggatcaagatcgataaagaagccaatgacttcaaaggtgaggagaagatcatttcaacgcccgattccaaagtgattgcgatggtagttccgaccaacgaggagctcatgatcgccaaagacacgaaagaaatcattgagaaagggttggacgagcttaagatc

SEQ ID NO: 480 - protein, 417 aa, synthetic construct
  REGION 1..417: note = Variant of acetate kinase
MHHHHHHGGSGMKVLVINSGSSSIKYQLLDMTNEKVLAKGLVERIGIDGSRIVHVVNGEKHVLEHEIKNHEIGLKLVLDLLTDEKYGVLKDLKEIDAVGHRVVHGGERFASSVKITDEVLKTIETLSFLAPLHNPANIMGIKSSMKVLPGVPQVAVFDTAFHQKMPEKAYLYAIPYEYYEKYKIRRYGFHGTSHRYVSKRAAEIMGKPYDQLKIITVHVGNGASVAAVKNGVSVDTSMGFTPLEGLVMGTRSGDIDPAIVEFLEKEEGLSAKEVVNILNKKSGVYGLTKGFSSDMRDIEDNAIEGDPVCRLALDVYEYRIAKYIGAYAAAMNGVDAIVFTAGVGENSPIMREEIIENYLGYLGIKIDKEANDFKGEEKIISTPDSKVIAMVVPTNEELMIAKDTKEIIEKGLDELKI

SEQ ID NO: 481 - DNA, 1251 bp, synthetic construct
  misc_feature 1..1251: note = Variant of acetate kinase
  source 1..1251: mol_type = other DNA
atgcaccatcatcatcatcatggcggtagcggcatgaaagttctggtgattaattctggtagctcctccatcaaatatcagctcctcgatatgaccaacgaaaaggtattagcgaaaggcttggtcgagcgcattggcatcgacggttcgcgtatcgtgcataaagttaacggcgaaaaacacgtgctgcagcatgagattaagaatcacgaaattggacttaaattggtcctggatcttcttacggacgaaaaatacggtgtgttgaaggatctcaaagaaatcgatgcagttgggcatcgcgtagtacatggcggcgagcgttttgccagtagcgtgaagattactgacgaagtcttaaagaccatcgagacgttgtcgttcttagctccgttacacaatccagcgaacattatgggtatcaagagcagcatgaaagtgttaccgggtgtgcctcaagttgccgtctttgatacagcgttccaccagaagatgccggagaaagcctatttgtacgcaatcccctatgagtactacgagaaatataaaattcgccgctatgggtttcatggaacctcacatcgttatgtgagtaaacgtgctgcggaaattatgggcaaaccgtacgatcagctcaagatcattaccgttcacgtgggtaacggcgcatcagttgcggcggtgaagaatggcgtatctgttgacacttccatgggtttcacaccacttgaaggtcttgtcatgggcacgcgcagcggcgatattgatccggccatcgtggaatttcttgagaaagaagaaggattgtcggccaaagaagtcgtcaacatcctcaacaagaaatctggtgtgtatgggctcaccaaaggctttagtagtgacatgcgtgacattgaagataatgctattgaaggtgatcctgtatgccgccttgcattagatgtgtacgaatatcgtatcgcgaaatatattggcgcatacgctgcggccatgaacggtgttgacgcgatcgtctttaccgcaggagttggcgaaaatagcccgattatgcgcgaagaaattattgagaactacttgggctacttagggatcaagatcgataaagaagccaatgacttcaaaggtgaggagaagatcatttcaacgcccgattccaaagtgattgcgatggtagttccgaccaacgaggagctcatgatcgccaaagacacgaaagaaatcattgagaaagggttggacgagcttaagatc

SEQ ID NO: 482 - protein, 417 aa, synthetic construct
  REGION 1..417: note = Variant of acetate kinase
MHHHHHHGGSGMKVLVINSGSSSIKYQLLDMTNEKVLAKGLVERIGIDGSRIVHKVNGEKHVLQHEIKNHEIGLKLVLDLLTDEKYGVLKDLKEIDAVGHRVVHGGERFASSVKITDEVLKTIETLSFLAPLHNPANIMGIKSSMKVLPGVPQVAVFDTAFHQKMPEKAYLYAIPYEYYEKYKIRRYGFHGTSHRYVSKRAAEIMGKPYDQLKIITVHVGNGASVAAVKNGVSVDTSMGFTPLEGLVMGTRSGDIDPAIVEFLEKEEGLSAKEVVNILNKKSGVYGLTKGFSSDMRDIEDNAIEGDPVCRLALDVYEYRIAKYIGAYAAAMNGVDAIVFTAGVGENSPIMREEIIENYLGYLGIKIDKEANDFKGEEKIISTPDSKVIAMVVPTNEELMIAKDTKEIIEKGLDELKI

SEQ ID NO: 483 - DNA, 1251 bp, synthetic construct
  misc_feature 1..1251: note = Variant of acetate kinase
  source 1..1251: mol_type = other DNA
atgcaccatcatcatcatcatggcggtagcggcatgaaagttctggtgattaattctggtagctcctccatcaaatatcagctcctcgatatgaccaacgaaaaggtattagcgaaaggcttggtcgagcgcattggcatcgacggttcgcgtatcgtgcataaagttaacggcgaaaaacacgtgctggaacatgagattaagaatcacgaaattggacttaaattggtcctggatcttcttacggacgaaaaatacggtgtgttgaaggatctcaaagaaatcgatgcagttgggcatcgcgtagtacatggcggcgagcgttttgccagtagcgtgaagattactgacgaagtcttaaagaccatcgagacgttgtcgttcttagctccgttacacaatccagcgaacattatgggtatcaagagcagcatgaaagtgttaccgggtgtgcctcaagttgccgtctttgatacagcgttccaccagaagatgccggagaaagcctatttgtacgcaatcccctatgagtactacgagaaatataaaattcgccgctatgggtttcatggagtgtcacatcgttatgtgagtaaacgtgctgcggaaattatgggcaaaccgtacgatcagctcaagatcattaccgttcacgtgggtaacggcgcatcagttgcggcggtgaagaatggcgtatctgttgacacttccatgggtttcacaccacttgaaggtcttgtcatgggcacgcgcagcggcgatattgatccggccatcgtggaatttcttgagaaagaagaaggattgtcggccaaagaagtcgtcaacatcctcaacaagaaatctggtgtgtatgggctcaccaaaggctttagtagtgacatgcgtgacattgaagataatgctattgaaggtgatcctgtatgccgccttgcattagatgtgtacgaatatcgtatcgcgaaatatattggcgcatacgctgcggccatgaacggtgttgacgcgatcgtctttaccgcaggagttggcgaaaatagcccgattatgcgcgaagaaattattgagaactacttgggctacttagggatcaagatcgataaagaagccaatgacttcaaaggtgaggagaagatcatttcaacgcccgattccaaagtgattgcgatggtagttccgaccaacgaggagctcatgatcgccaaagacacgaaagaaatcattgagaaagggttggacgagcttaagatc

SEQ ID NO: 484 - protein, 417 aa, synthetic construct
  REGION 1..417: note = Variant of acetate kinase
MHHHHHHGGSGMKVLVINSGSSSIKYQLLDMTNEKVLAKGLVERIGIDGSRIVHKVNGEKHVLEHEIKNHEIGLKLVLDLLTDEKYGVLKDLKEIDAVGHRVVHGGERFASSVKITDEVLKTIETLSFLAPLHNPANIMGIKSSMKVLPGVPQVAVFDTAFHQKMPEKAYLYAIPYEYYEKYKIRRYGFHGVSHRYVSKRAAEIMGKPYDQLKIITVHVGNGASVAAVKNGVSVDTSMGFTPLEGLVMGTRSGDIDPAIVEFLEKEEGLSAKEVVNILNKKSGVYGLTKGFSSDMRDIEDNAIEGDPVCRLALDVYEYRIAKYIGAYAAAMNGVDAIVFTAGVGENSPIMREEIIENYLGYLGIKIDKEANDFKGEEKIISTPDSKVIAMVVPTNEELMIAKDTKEIIEKGLDELKI

SEQ ID NO: 485 - DNA, 1251 bp, synthetic construct
  misc_feature 1..1251: note = Variant of acetate kinase
  source 1..1251: mol_type = other DNA
atgcaccatcatcatcatcatggcggtagcggcatgaaagttctggtgattaattctggtagctcctccatcaaatatcagctcctcgatatgaccaacgaaaaggtattagcgaaaggcttggtcgagcgcattggcatcgacggttcgcgtatcgtgcataaagttaacggcgaaaaacacgtgctggaacatgagattaagaatcacgaaattggacttaaattggtcctggatatgcttacggacgaaaaatacggtgtgttgaaggatctcaaagaaatcgatgcagttgggcatcgcgtagtacatggcggcgagcgttttgccagtagcgtgaagattactgacgaagtcttaaagaccatcgagacgttgtcgttcttagctccgttacacaatccagcgaacattatgggtatcaagagcagcatgaaagtgttaccgggtgtgcctcaagttgccgtctttgatacagcgttccaccagaagatgccggagaaagcctatttgtacgcaatcccctatgagtactacgagaaatataaaattcgccgctatgggtttcatggaacctcacatcgttatgtgagtaaacgtgctgcggaaattatgggcaaaccgtacgatcagctcaagatcattaccgttcacgtgggtaacggcgcatcagttgcggcggtgaagaatggcgtatctgttgacacttccatgggtttcacaccacttgaaggtcttgtcatgggcacgcgcagcggcgatattgatccggccatcgtggaatttcttgagaaagaagaaggattgtcggccaaagaagtcgtcaacatcctcaacaagaaatctggtgtgtatgggctcaccaaaggctttagtagtgacatgcgtgacattgaagataatgctattgaaggtgatcctgtatgccgccttgcattagatgtgtacgaatatcgtatcgcgaaatatattggcgcatacgctgcggccatgaacggtgttgacgcgatcgtctttaccgcaggagttggcgaaaatagcccgattatgcgcgaagaaattattgagaactacttgggctacttagggatcaagatcgataaagaagccaatgacttcaaaggtgaggagaagatcatttcaacgcccgattccaaagtgattgcgatggtagttccgaccaacgaggagctcatgatcgccaaagacacgaaagaaatcattgagaaagggttggacgagcttaagatc

SEQ ID NO: 486 - protein, 417 aa, synthetic construct
  REGION 1..417: note = Variant of acetate kinase
MHHHHHHGGSGMKVLVINSGSSSIKYQLLDMTNEKVLAKGLVERIGIDGSRIVHKVNGEKHVLEHEIKNHEIGLKLVLDMLTDEKYGVLKDLKEIDAVGHRVVHGGERFASSVKITDEVLKTIETLSFLAPLHNPANIMGIKSSMKVLPGVPQVAVFDTAFHQKMPEKAYLYAIPYEYYEKYKIRRYGFHGTSHRYVSKRAAEIMGKPYDQLKIITVHVGNGASVAAVKNGVSVDTSMGFTPLEGLVMGTRSGDIDPAIVEFLEKEEGLSAKEVVNILNKKSGVYGLTKGFSSDMRDIEDNAIEGDPVCRLALDVYEYRIAKYIGAYAAAMNGVDAIVFTAGVGENSPIMREEIIENYLGYLGIKIDKEANDFKGEEKIISTPDSKVIAMVVPTNEELMIAKDTKEIIEKGLDELKI

SEQ ID NO: 487 - DNA, 1251 bp, synthetic construct
  misc_feature 1..1251: note = Variant of acetate kinase
  source 1..1251: mol_type = other DNA
atgcaccatcatcatcatcatggcggtagcggcatgaaagttctggtgattaattctggtagctcctccatcaaatatcagctcctcgatatgaccaacgaaaaggtattagcgaaaggcttggtcgagcgcattggcatcgacggttcgcgtatcgtgcataaagttaacggcgaacctcacgtgctggaacatgagattaagaatcacgaaattggacttaaattggtcctggatcttcttacggacgaaaaatacggtgtgttgaaggatctcaaagaaatcgatgcagttgggcatcgcgtagtacatggcggcgagcgttttgccagtagcgtgaagattactgacgaagtcttaaagaccatcgagacgttgtcgttcttagctccgttacacaatccagcgaacattatgggtatcaagagcagcatgaaagtgttaccgggtgtgcctcaagttgccgtctttgatacagcgttccaccagaagatgccggagaaagcctatttgtacgcaatcccctatgagtactacgagaaatataaaattcgccgctatgggtttcatggaacctcacatcgttatgtgagtaaacgtgctgcggaaattatgggcaaaccgtacgatcagctcaagatcattaccgttcacgtgggtaacggcgcatcagttgcggcggtgaagaatggcgtatctgttgacacttccatgggtttcacaccacttgaaggtcttgtcatgggcacgcgcagcggcgatattgatccggccatcgtggaatttcttgagaaagaagaaggattgtcggccaaagaagtcgtcaacatcctcaacaagaaatctggtgtgtatgggctcaccaaaggctttagtagtgacatgcgtgacattgaagataatgctattgaaggtgatcctgtatgccgccttgcattagatgtgtacgaatatcgtatcgcgaaatatattggcgcatacgctgcggccatgaacggtgttgacgcgatcgtctttaccgcaggagttggcgaaaatagcccgattatgcgcgaagaaattattgagaactacttgggctacttagggatcaagatcgataaagaagccaatgacttcaaaggtgaggagaagatcatttcaacgcccgattccaaagtgattgcgatggtagttccgaccaacgaggagctcatgatcgccaaagacacgaaagaaatcattgagaaagggttggacgagcttaagatc

SEQ ID NO: 488 - protein, 417 aa, synthetic construct
  REGION 1..417: note = Variant of acetate kinase
MHHHHHHGGSGMKVLVINSGSSSIKYQLLDMTNEKVLAKGLVERIGIDGSRIVHKVNGEPHVLEHEIKNHEIGLKLVLDLLTDEKYGVLKDLKEIDAVGHRVVHGGERFASSVKITDEVLKTIETLSFLAPLHNPANIMGIKSSMKVLPGVPQVAVFDTAFHQKMPEKAYLYAIPYEYYEKYKIRRYGFHGTSHRYVSKRAAEIMGKPYDQLKIITVHVGNGASVAAVKNGVSVDTSMGFTPLEGLVMGTRSGDIDPAIVEFLEKEEGLSAKEVVNILNKKSGVYGLTKGFSSDMRDIEDNAIEGDPVCRLALDVYEYRIAKYIGAYAAAMNGVDAIVFTAGVGENSPIMREEIIENYLGYLGIKIDKEANDFKGEEKIISTPDSKVIAMVVPTNEELMIAKDTKEIIEKGLDELKI

SEQ ID NO: 489 - DNA, 1251 bp, synthetic construct
  misc_feature 1..1251: note = Variant of acetate kinase
  source 1..1251: mol_type = other DNA
atgcaccatcatcatcatcatggcggtagcggcatgaaagttctggtgattaattctggtagctcctccatcaaatatcagctcctcgatatgaccaacgaaaaggtattagcgaaaggcttggtcgagcgcattggcatcgacggttcgcgtatcgtgcataaagttaacggcgaaaaaaaggtgctggaacatgagattaagaatcacgaaattggacttaaattggtcctggatcttcttacggacgaaaaatacggtgtgttgaaggatctcaaagaaatcgatgcagttgggcatcgcgtagtacatggcggcgagcgttttgccagtagcgtgaagattactgacgaagtcttaaagaccatcgagacgttgtcgttcttagctccgttacacaatccagcgaacattatgggtatcaagagcagcatgaaagtgttaccgggtgtgcctcaagttgccgtctttgatacagcgttccaccagaagatgccggagaaagcctatttgtacgcaatcccctatgagtactacgagaaatataaaattcgccgctatgggtttcatggaacctcacatcgttatgtgagtaaacgtgctgcggaaattatgggcaaaccgtacgatcagctcaagatcattaccgttcacgtgggtaacggcgcatcagttgcggcggtgaagaatggcgtatctgttgacacttccatgggtttcacaccacttgaaggtcttgtcatgggcacgcgcagcggcgatattgatccggccatcgtggaatttcttgagaaagaagaaggattgtcggccaaagaagtcgtcaacatcctcaacaagaaatctggtgtgtatgggctcaccaaaggctttagtagtgacatgcgtgacattgaagataatgctattgaaggtgatcctgtatgccgccttgcattagatgtgtacgaatatcgtatcgcgaaatatattggcgcatacgctgcggccatgaacggtgttgacgcgatcgtctttaccgcaggagttggcgaaaatagcccgattatgcgcgaagaaattattgagaactacttgggctacttagggatcaagatcgataaagaagccaatgacttcaaaggtgaggagaagatcatttcaacgcccgattccaaagtgattgcgatggtagttccgaccaacgaggagctcatgatcgccaaagacacgaaagaaatcattgagaaagggttggacgagcttaagatc

SEQ ID NO: 490 - protein, 417 aa, synthetic construct
  REGION 1..417: note = Variant of acetate kinase
MHHHHHHGGSGMKVLVINSGSSSIKYQLLDMTNEKVLAKGLVERIGIDGSRIVHKVNGEKKVLEHEIKNHEIGLKLVLDLLTDEKYGVLKDLKEIDAVGHRVVHGGERFASSVKITDEVLKTIETLSFLAPLHNPANIMGIKSSMKVLPGVPQVAVFDTAFHQKMPEKAYLYAIPYEYYEKYKIRRYGFHGTSHRYVSKRAAEIMGKPYDQLKIITVHVGNGASVAAVKNGVSVDTSMGFTPLEGLVMGTRSGDIDPAIVEFLEKEEGLSAKEVVNILNKKSGVYGLTKGFSSDMRDIEDNAIEGDPVCRLALDVYEYRIAKYIGAYAAAMNGVDAIVFTAGVGENSPIMREEIIENYLGYLGIKIDKEANDFKGEEKIISTPDSKVIAMVVPTNEELMIAKDTKEIIEKGLDELKI

SEQ ID NO: 491 - DNA, 1251 bp, synthetic construct
  misc_feature 1..1251: note = Variant of acetate kinase
  source 1..1251: mol_type = other DNA
atgcaccatcatcatcatcatggcggtagcggcatgaaagttctggtgattaattctggtagctcctccatcaaatatcagctcctcgatatgaccaacgaaaaggtattagcgaaaggcttggtcgagcgcattggcatcgacggttcgcgtatcgtgcataaagttaacggcgaaaaacacgtgctggaacatgagattaagaatcacgaaattggacttaaattggtcctggatcttcttacggacgaaaaatacggtgtgttgaaggatctcaaagaaatcgatgcagttgggcatcgcgtagtacatggcggcgagcgttttgccagtagcgtgaagattactgacgaagtcttaaagaccatcgagacgttgtcgttcttagctccgttacaccagccagcgaacattatgggtatcaagagcagcatgaaagtgttaccgggtgtgcctcaagttgccgtctttgatacagcgttccaccagaagatgccggagaaagcctatttgtacgcaatcccctatgagtactacgagaaatataaaattcgccgctatgggtttcatggaacctcacatcgttatgtgagtaaacgtgctgcggaaattatgggcaaaccgtacgatcagctcaagatcattaccgttcacgtgggtaacggcgcatcagttgcggcggtgaagaatggcgtatctgttgacacttccatgggtttcacaccacttgaaggtcttgtcatgggcacgcgcagcggcgatattgatccggccatcgtggaatttcttgagaaagaagaaggattgtcggccaaagaagtcgtcaacatcctcaacaagaaatctggtgtgtatgggctcaccaaaggctttagtagtgacatgcgtgacattgaagataatgctattgaaggtgatcctgtatgccgccttgcattagatgtgtacgaatatcgtatcgcgaaatatattggcgcatacgctgcggccatgaacggtgttgacgcgatcgtctttaccgcaggagttggcgaaaatagcccgattatgcgcgaagaaattattgagaactacttgggctacttagggatcaagatcgataaagaagccaatgacttcaaaggtgaggagaagatcatttcaacgcccgattccaaagtgattgcgatggtagttccgaccaacgaggagctcatgatcgccaaagacacgaaagaaatcattgagaaagggttggacgagcttaagatc

SEQ ID NO: 492 - protein, 417 aa, synthetic construct
  REGION 1..417: note = Variant of acetate kinase
MHHHHHHGGSGMKVLVINSGSSSIKYQLLDMTNEKVLAKGLVERIGIDGSRIVHKVNGEKHVLEHEIKNHEIGLKLVLDLLTDEKYGVLKDLKEIDAVGHRVVHGGERFASSVKITDEVLKTIETLSFLAPLHQPANIMGIKSSMKVLPGVPQVAVFDTAFHQKMPEKAYLYAIPYEYYEKYKIRRYGFHGTSHRYVSKRAAEIMGKPYDQLKIITVHVGNGASVAAVKNGVSVDTSMGFTPLEGLVMGTRSGDIDPAIVEFLEKEEGLSAKEVVNILNKKSGVYGLTKGFSSDMRDIEDNAIEGDPVCRLALDVYEYRIAKYIGAYAAAMNGVDAIVFTAGVGENSPIMREEIIENYLGYLGIKIDKEANDFKGEEKIISTPDSKVIAMVVPTNEELMIAKDTKEIIEKGLDELKI

SEQ ID NO: 493 - DNA, 1251 bp, synthetic construct
  misc_feature 1..1251: note = Variant of acetate kinase
  source 1..1251: mol_type = other DNA
atgcaccatcatcatcatcatggcggtagcggcatgaaagttctggtgattaattctggtagctcctccatcaaatatcagctcctcgatatgaccaacgaaaaggtattagcgaaaggcttggtcgagcgcattggcatcgacggttcgcgtatcgtgcatatggttaacggcgaaaaacacgtgctggaacatgagattaagaatcacgaaattggacttaaattggtcctggatcttcttacggacgaaaaatacggtgtgttgaaggatctcaaagaaatcgatgcagttgggcatcgcgtagtacatggcggcgagcgttttgccagtagcgtgaagattactgacgaagtcttaaagaccatcgagacgttgtcgttcttagctccgttacacaatccagcgaacattatgggtatcaagagcagcatgaaagtgttaccgggtgtgcctcaagttgccgtctttgatacagcgttccaccagaagatgccggagaaagcctatttgtacgcaatcccctatgagtactacgagaaatataaaattcgccgctatgggtttcatggaacctcacatcgttatgtgagtaaacgtgctgcggaaattatgggcaaaccgtacgatcagctcaagatcattaccgttcacgtgggtaacggcgcatcagttgcggcggtgaagaatggcgtatctgttgacacttccatgggtttcacaccacttgaaggtcttgtcatgggcacgcgcagcggcgatattgatccggccatcgtggaatttcttgagaaagaagaaggattgtcggccaaagaagtcgtcaacatcctcaacaagaaatctggtgtgtatgggctcaccaaaggctttagtagtgacatgcgtgacattgaagataatgctattgaaggtgatcctgtatgccgccttgcattagatgtgtacgaatatcgtatcgcgaaatatattggcgcatacgctgcggccatgaacggtgttgacgcgatcgtctttaccgcaggagttggcgaaaatagcccgattatgcgcgaagaaattattgagaactacttgggctacttagggatcaagatcgataaagaagccaatgacttcaaaggtgaggagaagatcatttcaacgcccgattccaaagtgattgcgatggtagttccgaccaacgaggagctcatgatcgccaaagacacgaaagaaatcattgagaaagggttggacgagcttaagatc

SEQ ID NO: 494 - protein, 417 aa, synthetic construct
  REGION 1..417: note = Variant of acetate kinase
MHHHHHHGGSGMKVLVINSGSSSIKYQLLDMTNEKVLAKGLVERIGIDGSRIVHMVNGEKHVLEHEIKNHEIGLKLVLDLLTDEKYGVLKDLKEIDAVGHRVVHGGERFASSVKITDEVLKTIETLSFLAPLHNPANIMGIKSSMKVLPGVPQVAVFDTAFHQKMPEKAYLYAIPYEYYEKYKIRRYGFHGTSHRYVSKRAAEIMGKPYDQLKIITVHVGNGASVAAVKNGVSVDTSMGFTPLEGLVMGTRSGDIDPAIVEFLEKEEGLSAKEVVNILNKKSGVYGLTKGFSSDMRDIEDNAIEGDPVCRLALDVYEYRIAKYIGAYAAAMNGVDAIVFTAGVGENSPIMREEIIENYLGYLGIKIDKEANDFKGEEKIISTPDSKVIAMVVPTNEELMIAKDTKEIIEKGLDELKI

SEQ ID NO: 495 - DNA, 1251 bp, synthetic construct
  misc_feature 1..1251: note = Variant of acetate kinase
  source 1..1251: mol_type = other DNA
atgcaccatcatcatcatcatggcggtagcggcatgaaagttctggtgattaattctggtagctcctccatcaaatatcagctcctcgatatgaccaacgaaaaggtattagcgaaaggcttggtcgagcgcattggcatcgacggttcgcgtatcgtgcataaagttaacggcgaaaaacacgtgctggaacatgagattggtaatcacgaaattggacttaaattggtcctggatcttcttacggacgaaaaatacggtgtgttgaaggatctcaaagaaatcgatgcagttgggcatcgcgtagtacatggcggcgagcgttttgccagtagcgtgaagattactgacgaagtcttaaagaccatcgagacgttgtcgttcttagctccgttacacaatccagcgaacattatgggtatcaagagcagcatgaaagtgttaccgggtgtgcctcaagttgccgtctttgatacagcgttccaccagaagatgccggagaaagcctatttgtacgcaatcccctatgagtactacgagaaatataaaattcgccgctatgggtttcatggaacctcacatcgttatgtgagtaaacgtgctgcggaaattatgggcaaaccgtacgatcagctcaagatcattaccgttcacgtgggtaacggcgcatcagttgcggcggtgaagaatggcgtatctgttgacacttccatgggtttcacaccacttgaaggtcttgtcatgggcacgcgcagcggcgatattgatccggccatcgtggaatttcttgagaaagaagaaggattgtcggccaaagaagtcgtcaacatcctcaacaagaaatctggtgtgtatgggctcaccaaaggctttagtagtgacatgcgtgacattgaagataatgctattgaaggtgatcctgtatgccgccttgcattagatgtgtacgaatatcgtatcgcgaaatatattggcgcatacgctgcggccatgaacggtgttgacgcgatcgtctttaccgcaggagttggcgaaaatagcccgattatgcgcgaagaaattattgagaactacttgggctacttagggatcaagatcgataaagaagccaatgacttcaaaggtgaggagaagatcatttcaacgcccgattccaaagtgattgcgatggtagttccgaccaacgaggagctcatgatcgccaaagacacgaaagaaatcattgagaaagggttggacgagcttaagatc

SEQ ID NO: 496 - protein, 417 aa, synthetic construct
  REGION 1..417: note = Variant of acetate kinase
MHHHHHHGGSGMKVLVINSGSSSIKYQLLDMTNEKVLAKGLVERIGIDGSRIVHKVNGEKHVLEHEIGNHEIGLKLVLDLLTDEKYGVLKDLKEIDAVGHRVVHGGERFASSVKITDEVLKTIETLSFLAPLHNPANIMGIKSSMKVLPGVPQVAVFDTAFHQKMPEKAYLYAIPYEYYEKYKIRRYGFHGTSHRYVSKRAAEIMGKPYDQLKIITVHVGNGASVAAVKNGVSVDTSMGFTPLEGLVMGTRSGDIDPAIVEFLEKEEGLSAKEVVNILNKKSGVYGLTKGFSSDMRDIEDNAIEGDPVCRLALDVYEYRIAKYIGAYAAAMNGVDAIVFTAGVGENSPIMREEIIENYLGYLGIKIDKEANDFKGEEKIISTPDSKVIAMVVPTNEELMIAKDTKEIIEKGLDELKI

SEQ ID NO: 497 - DNA, 1251 bp, synthetic construct
  misc_feature 1..1251: note = Variant of acetate kinase
  source 1..1251: mol_type = other DNA
atgcaccatcatcatcatcatggcggtagcggcatgaaagttctggtgattaattctggtagctcctccatcaaatatcagctcctcgatatgaccaacgaaaaggtattagcgaaaggcttggtcgagcgcattggcatcgacggttcgcgtatcgtgcattttgttaacggcgaaaaacacgtgctggaacatgagattaagaatcacgaaattggacttaaattggtcctggatcttcttacggacgaaaaatacggtgtgttgaaggatctcaaagaaatcgatgcagttgggcatcgcgtagtacatggcggcgagcgttttgccagtagcgtgaagattactgacgaagtcttaaagaccatcgagacgttgtcgttcttagctccgttacacaatccagcgaacattatgggtatcaagagcagcatgaaagtgttaccgggtgtgcctcaagttgccgtctttgatacagcgttccaccagaagatgccggagaaagcctatttgtacgcaatcccctatgagtactacgagaaatataaaattcgccgctatgggtttcatggaacctcacatcgttatgtgagtaaacgtgctgcggaaattatgggcaaaccgtacgatcagctcaagatcattaccgttcacgtgggtaacggcgcatcagttgcggcggtgaagaatggcgtatctgttgacacttccatgggtttcacaccacttgaaggtcttgtcatgggcacgcgcagcggcgatattgatccggccatcgtggaatttcttgagaaagaagaaggattgtcggccaaagaagtcgtcaacatcctcaacaagaaatctggtgtgtatgggctcaccaaaggctttagtagtgacatgcgtgacattgaagataatgctattgaaggtgatcctgtatgccgccttgcattagatgtgtacgaatatcgtatcgcgaaatatattggcgcatacgctgcggccatgaacggtgttgacgcgatcgtctttaccgcaggagttggcgaaaatagcccgattatgcgcgaagaaattattgagaactacttgggctacttagggatcaagatcgataaagaagccaatgacttcaaaggtgaggagaagatcatttcaacgcccgattccaaagtgattgcgatggtagttccgaccaacgaggagctcatgatcgccaaagacacgaaagaaatcattgagaaagggttggacgagcttaagatc

SEQ ID NO: 498 - protein, 417 aa, synthetic construct
  REGION 1..417: note = Variant of acetate kinase
MHHHHHHGGSGMKVLVINSGSSSIKYQLLDMTNEKVLAKGLVERIGIDGSRIVHFVNGEKHVLEHEIKNHEIGLKLVLDLLTDEKYGVLKDLKEIDAVGHRVVHGGERFASSVKITDEVLKTIETLSFLAPLHNPANIMGIKSSMKVLPGVPQVAVFDTAFHQKMPEKAYLYAIPYEYYEKYKIRRYGFHGTSHRYVSKRAAEIMGKPYDQLKIITVHVGNGASVAAVKNGVSVDTSMGFTPLEGLVMGTRSGDIDPAIVEFLEKEEGLSAKEVVNILNKKSGVYGLTKGFSSDMRDIEDNAIEGDPVCRLALDVYEYRIAKYIGAYAAAMNGVDAIVFTAGVGENSPIMREEIIENYLGYLGIKIDKEANDFKGEEKIISTPDSKVIAMVVPTNEELMIAKDTKEIIEKGLDELKI

SEQ ID NO: 499 - DNA, 1251 bp, synthetic construct
  misc_feature 1..1251: note = Variant of acetate kinase
  source 1..1251: mol_type = other DNA
atgcaccatcatcatcatcatggcggtagcggcatgaaagttctggtgattaattctggtagctcctccatcaaatatcagctcctcgatatgaccaacgaaaaggtattagcgaaaggcttggtcgagcgcattggcatcgacggttcgcgtatcgtgcatcttgttaacggcgaaaaacacgtgctggaacatgagattaagaatcacgaaattggacttaaattggtcctggatcttcttacggacgaaaaatacggtgtgttgaaggatctcaaagaaatcgatgcagttgggcatcgcgtagtacatggcggcgagcgttttgccagtagcgtgaagattactgacgaagtcttaaagaccatcgagacgttgtcgttcttagctccgttacacaatccagcgaacattatgggtatcaagagcagcatgaaagtgttaccgggtgtgcctcaagttgccgtctttgatacagcgttccaccagaagatgccggagaaagcctatttgtacgcaatcccctatgagtactacgagaaatataaaattcgccgctatgggtttcatggaacctcacatcgttatgtgagtaaacgtgctgcggaaattatgggcaaaccgtacgatcagctcaagatcattaccgttcacgtgggtaacggcgcatcagttgcggcggtgaagaatggcgtatctgttgacacttccatgggtttcacaccacttgaaggtcttgtcatgggcacgcgcagcggcgatattgatccggccatcgtggaatttcttgagaaagaagaaggattgtcggccaaagaagtcgtcaacatcctcaacaagaaatctggtgtgtatgggctcaccaaaggctttagtagtgacatgcgtgacattgaagataatgctattgaaggtgatcctgtatgccgccttgcattagatgtgtacgaatatcgtatcgcgaaatatattggcgcatacgctgcggccatgaacggtgttgacgcgatcgtctttaccgcaggagttggcgaaaatagcccgattatgcgcgaagaaattattgagaactacttgggctacttagggatcaagatcgataaagaagccaatgacttcaaaggtgaggagaagatcatttcaacgcccgattccaaagtgattgcgatggtagttccgaccaacgaggagctcatgatcgccaaagacacgaaagaaatcattgagaaagggttggacgagcttaagatc

SEQ ID NO: 500 - protein, 417 aa, synthetic construct
  REGION 1..417: note = Variant of acetate kinase
MHHHHHHGGSGMKVLVINSGSSSIKYQLLDMTNEKVLAKGLVERIGIDGSRIVHLVNGEKHVLEHEIKNHEIGLKLVLDLLTDEKYGVLKDLKEIDAVGHRVVHGGERFASSVKITDEVLKTIETLSFLAPLHNPANIMGIKSSMKVLPGVPQVAVFDTAFHQKMPEKAYLYAIPYEYYEKYKIRRYGFHGTSHRYVSKRAAEIMGKPYDQLKIITVHVGNGASVAAVKNGVSVDTSMGFTPLEGLVMGTRSGDIDPAIVEFLEKEEGLSAKEVVNILNKKSGVYGLTKGFSSDMRDIEDNAIEGDPVCRLALDVYEYRIAKYIGAYAAAMNGVDAIVFTAGVGENSPIMREEIIENYLGYLGIKIDKEANDFKGEEKIISTPDSKVIAMVVPTNEELMIAKDTKEIIEKGLDELKI

SEQ ID NO: 501 - DNA, 1251 bp, synthetic construct
  misc_feature 1..1251: note = Variant of acetate kinase
  source 1..1251: mol_type = other DNA
atgcaccatcatcatcatcatggcggtagcggcatgaaagttctggtgattaattctggtagctcctccatcaaatatcagctcctcgatatgaccaacgaaaaggtattagcgaaaggcttggtcgagcgcattggcatcgacggttcgcgtatcgtgcataaagttaacggcgaaaaacacgtgctggaacatgagattaagaatcacgaaattggacttaaattggtcctggatcttcttacggacgaaaaatacggtgtgttgaaggatctcaaagaaatcgatgcagttgggcatcgcgtagtacatggcggcgagcgttttgccagtagcgtgaagattactgacgaagtcttaaagaccatcgagacgttgtcgttcttagctccgttacacaatccagcgaacattatgggtatcaagagcagcatgaaagtgttaccgggtgtgcctcaagttgccgtctttgatacagcgttccaccagaagatgccggagaaagcctatttgtacgcaatcccctatgagtactacgagaaatataaaattcgccgctatgggtttcatggaacctcacatcgttatgtgagtaaacgtgctgcggaaattatgggcaaaccgtacgatcagctcaagatcattaccgttcacgtgggtaacggcgcatcagttgcggcggtgaagaatggcgtatctgttgacacttccatgggtttcacaccacttgaaggtcttgtcatggctacgcgcagcggcgatattgatccggccatcgtggaatttcttgagaaagaagaaggattgtcggccaaagaagtcgtcaacatcctcaacaagaaatctggtgtgtatgggctcaccaaaggctttagtagtgacatgcgtgacattgaagataatgctattgaaggtgatcctgtatgccgccttgcattagatgtgtacgaatatcgtatcgcgaaatatattggcgcatacgctgcggccatgaacggtgttgacgcgatcgtctttaccgcaggagttggcgaaaatagcccgattatgcgcgaagaaattattgagaactacttgggctacttagggatcaagatcgataaagaagccaatgacttcaaaggtgaggagaagatcatttcaacgcccgattccaaagtgattgcgatggtagttccgaccaacgaggagctcatgatcgccaaagacacgaaagaaatcattgagaaagggttggacgagcttaagatc

SEQ ID NO: 502 - protein, 417 aa, synthetic construct
  REGION 1..417: note = Variant of acetate kinase
MHHHHHHGGSGMKVLVINSGSSSIKYQLLDMTNEKVLAKGLVERIGIDGSRIVHKVNGEKHVLEHEIKNHEIGLKLVLDLLTDEKYGVLKDLKEIDAVGHRVVHGGERFASSVKITDEVLKTIETLSFLAPLHNPANIMGIKSSMKVLPGVPQVAVFDTAFHQKMPEKAYLYAIPYEYYEKYKIRRYGFHGTSHRYVSKRAAEIMGKPYDQLKIITVHVGNGASVAAVKNGVSVDTSMGFTPLEGLVMATRSGDIDPAIVEFLEKEEGLSAKEVVNILNKKSGVYGLTKGFSSDMRDIEDNAIEGDPVCRLALDVYEYRIAKYIGAYAAAMNGVDAIVFTAGVGENSPIMREEIIENYLGYLGIKIDKEANDFKGEEKIISTPDSKVIAMVVPTNEELMIAKDTKEIIEKGLDELKI

SEQ ID NO: 503 - DNA, 1251 bp, synthetic construct
  misc_feature 1..1251: note = Variant of acetate kinase
  source 1..1251: mol_type = other DNA
atgcaccatcatcatcatcatggcggtagcggcatgaaagttctggtgattaattctggtagctcctccatcaaatatcagctcctcgatatgaccaacgaaaaggtattagcgaaaggcttggtcgagcgcattggcatcgacggttcgcgtatcgtgcataaagttaacggcgaaaaacacgtgctggaacatgagattcagaatcacgaaattggacttaaattggtcctggatcttcttacggacgaaaaatacggtgtgttgaaggatctcaaagaaatcgatgcagttgggcatcgcgtagtacatggcggcgagcgttttgccagtagcgtgaagattactgacgaagtcttaaagaccatcgagacgttgtcgttcttagctccgttacacaatccagcgaacattatgggtatcaagagcagcatgaaagtgttaccgggtgtgcctcaagttgccgtctttgatacagcgttccaccagaagatgccggagaaagcctatttgtacgcaatcccctatgagtactacgagaaatataaaattcgccgctatgggtttcatggaacctcacatcgttatgtgagtaaacgtgctgcggaaattatgggcaaaccgtacgatcagctcaagatcattaccgttcacgtgggtaacggcgcatcagttgcggcggtgaagaatggcgtatctgttgacacttccatgggtttcacaccacttgaaggtcttgtcatgggcacgcgcagcggcgatattgatccggccatcgtggaatttcttgagaaagaagaaggattgtcggccaaagaagtcgtcaacatcctcaacaagaaatctggtgtgtatgggctcaccaaaggctttagtagtgacatgcgtgacattgaagataatgctattgaaggtgatcctgtatgccgccttgcattagatgtgtacgaatatcgtatcgcgaaatatattggcgcatacgctgcggccatgaacggtgttgacgcgatcgtctttaccgcaggagttggcgaaaatagcccgattatgcgcgaagaaattattgagaactacttgggctacttagggatcaagatcgataaagaagccaatgacttcaaaggtgaggagaagatcatttcaacgcccgattccaaagtgattgcgatggtagttccgaccaacgaggagctcatgatcgccaaagacacgaaagaaatcattgagaaagggttggacgagcttaagatc

SEQ ID NO: 504 - protein, 417 aa, synthetic construct
  REGION 1..417: note = Variant of acetate kinase
MHHHHHHGGSGMKVLVINSGSSSIKYQLLDMTNEKVLAKGLVERIGIDGSRIVHKVNGEKHVLEHEIQNHEIGLKLVLDLLTDEKYGVLKDLKEIDAVGHRVVHGGERFASSVKITDEVLKTIETLSFLAPLHNPANIMGIKSSMKVLPGVPQVAVFDTAFHQKMPEKAYLYAIPYEYYEKYKIRRYGFHGTSHRYVSKRAAEIMGKPYDQLKIITVHVGNGASVAAVKNGVSVDTSMGFTPLEGLVMGTRSGDIDPAIVEFLEKEEGLSAKEVVNILNKKSGVYGLTKGFSSDMRDIEDNAIEGDPVCRLALDVYEYRIAKYIGAYAAAMNGVDAIVFTAGVGENSPIMREEIIENYLGYLGIKIDKEANDFKGEEKIISTPDSKVIAMVVPTNEELMIAKDTKEIIEKGLDELKI

SEQ ID NO: 505 - DNA, 1251 bp, synthetic construct
  misc_feature 1..1251: note = Variant of acetate kinase
  source 1..1251: mol_type = other DNA
atgcaccatcatcatcatcatggcggtagcggcatgaaagttctggtgattaattctggtagctcctccatcaaatatcagctcctcgatatgaccaacgaaaaggtattagcgaaaggcttggtcgagcgcattggcatcgacggttcgcgtatcgtgcataaagttaacggcgaaaaacacgtgctggaacatgagattaagaatcacgaaattggacttaaattggtcctggatcttcttacggacgaaaaatacggtgtgttgaaggatctcaaagaaatcgatgcagttgggcatcgcgtagtacatggcggcgagcgttttgccagtagcgtgaagattactgacgaagtcttaaagaccatcgagacgttgtcgttcttagctccgttacacaatccagcgaacattatgggtatcaagagcagcatgaaagtgttaccgggtgtgcctcaagttgccgtctttgatacagcgttccaccagaagatgccggagaaagcctatttgtacgcaatcccctatgagtactacgagaaatataaaattcgccgctatgggtttcatggaacctcacatcgttatgtgagtaaacgtgctgcggaaattatgggcaaaccgtacgatcagctcaagatcattaccgttcacgtgggtaacggcgcatcagttgcggcggtgaagaatggcgtatctgttgacacttccatgggtttcacaccacttgaaggtcttgtcatgggcacgcgcagcggcgatattgatccggccatcgtggaatttcttgagaaagaagaaggattgtcggccaaagaagtcgtcaacatcctcaacaagaaatctggtgtgtatgggctcaccaaaggctttagtagtgacatgcgtgacattgaagatatggctattgaaggtgatcctgtatgccgccttgcattagatgtgtacgaatatcgtatcgcgaaatatattggcgcatacgctgcggccatgaacggtgttgacgcgatcgtctttaccgcaggagttggcgaaaatagcccgattatgcgcgaagaaattattgagaactacttgggctacttagggatcaagatcgataaagaagccaatgacttcaaaggtgaggagaagatcatttcaacgcccgattccaaagtgattgcgatggtagttccgaccaacgaggagctcatgatcgccaaagacacgaaagaaatcattgagaaagggttggacgagcttaagatc

SEQ ID NO: 506 - protein, 417 aa, synthetic construct
  REGION 1..417: note = Variant of acetate kinase
MHHHHHHGGSGMKVLVINSGSSSIKYQLLDMTNEKVLAKGLVERIGIDGSRIVHKVNGEKHVLEHEIKNHEIGLKLVLDLLTDEKYGVLKDLKEIDAVGHRVVHGGERFASSVKITDEVLKTIETLSFLAPLHNPANIMGIKSSMKVLPGVPQVAVFDTAFHQKMPEKAYLYAIPYEYYEKYKIRRYGFHGTSHRYVSKRAAEIMGKPYDQLKIITVHVGNGASVAAVKNGVSVDTSMGFTPLEGLVMGTRSGDIDPAIVEFLEKEEGLSAKEVVNILNKKSGVYGLTKGFSSDMRDIEDMAIEGDPVCRLALDVYEYRIAKYIGAYAAAMNGVDAIVFTAGVGENSPIMREEIIENYLGYLGIKIDKEANDFKGEEKIISTPDSKVIAMVVPTNEELMIAKDTKEIIEKGLDELKI

SEQ ID NO: 507 - DNA, 1251 bp, synthetic construct
  misc_feature 1..1251: note = Variant of acetate kinase
  source 1..1251: mol_type = other DNA
atgcaccatcatcatcatcatggcggtagcggcatgaaagttctggtgattaattctggtagctcctccatcaaatatcagctcctcgatatgaccaacgaaaaggtattagcgaaaggcttggtcgagcgcattggcatcgacggttcgcgtatcgtgcataaagttaacggcgaaaaacacgtgctggaacatgagattaagaatcacgaaattggacttaaattggtcctggatcttcttacggacgaaaaatacggtgtgttgaaggatctcaaagaaatcgatgcagttgggcatcgcgtagtacatggcggcgagcgttttgccagtagcgtgaagattactgacgaagtcttaaagaccatcgagacgttgtcgttcttagctccgttacacaatccagcgaacattatgggtatcaagagcagcatgaaagtgttaccgggtgtgcctcaagttgccgtctttgatacagcgttccaccagaagatgccggagaaagcctatttgtacgcaatcccctatgagtactacgagaaatataaaattcgccgctatgggtttcatggaacctcacatcgttatgtgagtaaacgtgctgcggaaattatgggcaaaccgtacgatcagctcaagatcattaccgttcacgtgggtaacggcgcatcagttgcggcggtgaagaatggcgtatctgttgacacttccatgggtttcacaccacttgaaggtcttgtcatgggcacgcgcagcggcgatattgatccggccatcgtggaatttcttgagaaagaagaaggattgtcggccaaagaagtcgtcaacatcctcaacaagaaatctggtgtgtatgggctcaccaaaggctttagtagtgacatgcgtgacattgaagataatgctattgaaggtgatcctgtatgccgccttgcattagatgtgtacgaatatcgtatcgcgaaatatattggcgcatacgctgcggccatgaacggtgttgacgcgatcgtctttaccgcaggagttggcgaaaatagcccgattatgcgcgaagaaattattgagaactacttgggctacttagggatcaagatcgataaagaagccaatgacttcaaaggtcgggagaagatcatttcaacgcccgattccaaagtgattgcgatggtagttccgaccaacgaggagctcatgatcgccaaagacacgaaagaaatcattgagaaagggttggacgagcttaagatc

SEQ ID NO: 508 - protein, 417 aa, synthetic construct
  REGION 1..417: note = Variant of acetate kinase
MHHHHHHGGSGMKVLVINSGSSSIKYQLLDMTNEKVLAKGLVERIGIDGSRIVHKVNGEKHVLEHEIKNHEIGLKLVLDLLTDEKYGVLKDLKEIDAVGHRVVHGGERFASSVKITDEVLKTIETLSFLAPLHNPANIMGIKSSMKVLPGVPQVAVFDTAFHQKMPEKAYLYAIPYEYYEKYKIRRYGFHGTSHRYVSKRAAEIMGKPYDQLKIITVHVGNGASVAAVKNGVSVDTSMGFTPLEGLVMGTRSGDIDPAIVEFLEKEEGLSAKEVVNILNKKSGVYGLTKGFSSDMRDIEDNAIEGDPVCRLALDVYEYRIAKYIGAYAAAMNGVDAIVFTAGVGENSPIMREEIIENYLGYLGIKIDKEANDFKGREKIISTPDSKVIAMVVPTNEELMIAKDTKEIIEKGLDELKI

SEQ ID NO: 509 - DNA, 1251 bp, synthetic construct
  misc_feature 1..1251: note = Variant of acetate kinase
  source 1..1251: mol_type = other DNA
atgcaccatcatcatcatcatggcggtagcggcatgaaagttctggtgattaattctggtagctcctccatcaaatatcagctcctcgatatgaccaacgaaaaggtattagcgaaaggcttggtcgagcgcattggcatcgacggttcgcgtatcgtgcataaagttaacggcgaaaaacacgtgctggaacatgagattaagaatcacgaaattggacttaaattggtcctggatcttcttacggacgaaaaatacggtgtgttgaaggatctcaaagaaatcgatgcagttgggcatcgcgtagtacatggcggcgagcgttttgccagtagcgtgaagattactgacgaagtcttaaagaccatcgagacgttgtcgttcttagctccgttacacaatccagcgaacattttgggtatcaagagcagcatgaaagtgttaccgggtgtgcctcaagttgccgtctttgatacagcgttccaccagaagatgccggagaaagcctatttgtacgcaatcccctatgagtactacgagaaatataaaattcgccgctatgggtttcatggaacctcacatcgttatgtgagtaaacgtgctgcggaaattatgggcaaaccgtacgatcagctcaagatcattaccgttcacgtgggtaacggcgcatcagttgcggcggtgaagaatggcgtatctgttgacacttccatgggtttcacaccacttgaaggtcttgtcatgggcacgcgcagcggcgatattgatccggccatcgtggaatttcttgagaaagaagaaggattgtcggccaaagaagtcgtcaacatcctcaacaagaaatctggtgtgtatgggctcaccaaaggctttagtagtgacatgcgtgacattgaagataatgctattgaaggtgatcctgtatgccgccttgcattagatgtgtacgaatatcgtatcgcgaaatatattggcgcatacgctgcggccatgaacggtgttgacgcgatcgtctttaccgcaggagttggcgaaaatagcccgattatgcgcgaagaaattattgagaactacttgggctacttagggatcaagatcgataaagaagccaatgacttcaaaggtgaggagaagatcatttcaacgcccgattccaaagtgattgcgatggtagttccgaccaacgaggagctcatgatcgccaaagacacgaaagaaatcattgagaaagggttggacgagcttaagatc

SEQ ID NO: 510 - protein, 417 aa, synthetic construct
  REGION 1..417: note = Variant of acetate kinase
MHHHHHHGGSGMKVLVINSGSSSIKYQLLDMTNEKVLAKGLVERIGIDGSRIVHKVNGEKHVLEHEIKNHEIGLKLVLDLLTDEKYGVLKDLKEIDAVGHRVVHGGERFASSVKITDEVLKTIETLSFLAPLHNPANILGIKSSMKVLPGVPQVAVFDTAFHQKMPEKAYLYAIPYEYYEKYKIRRYGFHGTSHRYVSKRAAEIMGKPYDQLKIITVHVGNGASVAAVKNGVSVDTSMGFTPLEGLVMGTRSGDIDPAIVEFLEKEEGLSAKEVVNILNKKSGVYGLTKGFSSDMRDIEDNAIEGDPVCRLALDVYEYRIAKYIGAYAAAMNGVDAIVFTAGVGENSPIMREEIIENYLGYLGIKIDKEANDFKGEEKIISTPDSKVIAMVVPTNEELMIAKDTKEIIEKGLDELKI

SEQ ID NO: 511 - DNA, 1251 bp, synthetic construct
  misc_feature 1..1251: note = Variant of acetate kinase
  source 1..1251: mol_type = other DNA
atgcaccatcatcatcatcatggcggtagcggcatgaaagttctggtgattaattctggtagctcctccatcaaatatcagctcctcgatatgaccaacgaaaaggtattagcgaaaggcttggtcgagcgcattggcatcgacggttcgcgtatcgtgcataaagttaacggcgaaaaacacgtgctggaacatgagattaagaatcacgaaattggacttaaattggtcctggatcttcttacggacgaaaaatacggtgtgttgaaggatctcaaagaaatcgatgcagttgggcatcgcgtagtacatggcggcgagcgttttgccagtagcgtgaagattactgacgaagtcttaaagaccatcgagacgttgtcgttcttagctccgttacacaatccagcgaacattatgggtatcaagagcagcatgaaagtgttaccgggtgtgcctcaagttgccgtctttgatacagcgttccaccagaagatgccggagaaagcctatttgtacgcaatcccctatgagtactacgagaaatataaaattcgccgctatgggtttcatggaacctcacatcgttatgtgagtaaacgtgctgcggaaattatgggcaaaccgtacgatcagctcaagatcattaccgttcacgtgggtaacggcgcatcagttgcggcggtgaagaatggcgtatctgttgacacttccatgggtttcacaccacttgaaggtcttgtcatgggcacgcgcagcggcgatattgatccggccatcgtggaatttcttgagaaagaagaaggattgtcggccaaagaagtcgtcaacatcctcaacaagaaatctggtgtgtatgggctcaccaaaggctttagtagtgacatgcgtgacattgaagataatgctattgaaggtgatcctgtatgccgccttgcattagatgtgtacacttatcgtatcgcgaaatatattggcgcatacgctgcggccatgaacggtgttgacgcgatcgtctttaccgcaggagttggcgaaaatagcccgattatgcgcgaagaaattattgagaactacttgggctacttagggatcaagatcgataaagaagccaatgacttcaaaggtgaggagaagatcatttcaacgcccgattccaaagtgattgcgatggtagttccgaccaacgaggagctcatgatcgccaaagacacgaaagaaatcattgagaaagggttggacgagcttaagatc

SEQ ID NO: 512 - protein, 417 aa, synthetic construct
  REGION 1..417: note = Variant of acetate kinase
MHHHHHHGGSGMKVLVINSGSSSIKYQLLDMTNEKVLAKGLVERIGIDGSRIVHKVNGEKHVLEHEIKNHEIGLKLVLDLLTDEKYGVLKDLKEIDAVGHRVVHGGERFASSVKITDEVLKTIETLSFLAPLHNPANIMGIKSSMKVLPGVPQVAVFDTAFHQKMPEKAYLYAIPYEYYEKYKIRRYGFHGTSHRYVSKRAAEIMGKPYDQLKIITVHVGNGASVAAVKNGVSVDTSMGFTPLEGLVMGTRSGDIDPAIVEFLEKEEGLSAKEVVNILNKKSGVYGLTKGFSSDMRDIEDNAIEGDPVCRLALDVYTYRIAKYIGAYAAAMNGVDAIVFTAGVGENSPIMREEIIENYLGYLGIKIDKEANDFKGEEKIISTPDSKVIAMVVPTNEELMIAKDTKEIIEKGLDELKI

SEQ ID NO: 513 - DNA, 1251 bp, synthetic construct
  misc_feature 1..1251: note = Variant of acetate kinase
  source 1..1251: mol_type = other DNA
atgcaccatcatcatcatcatggcggtagcggcatgaaagttctggtgattaattctggtagctcctccatcaaatatcagctcctcgatatgaccaacgaaaaggtattagcgaaaggcttggtcgagcgcattggcatcgacggttcgcgtatcgtgcataaagttaacggcgaaaaacacgtgctggaacatgagattaagaatcacgaaattggacttaaattggtcctggatcttcttacggacgaaaaatacggtgtgttgaaggatctcaaagaaatcgatgcagttgggcatcgcgtagtacatggcggcgagcgttttgccagtagcgtgaagattactgacgaagtcttaaagaccatcgagacgttgtcgttcttagctccgttacacaatccagcgaacattatgggtatcaagagcagcatgaaagtgttaccgggtgtgcctcaagttgccgtctttgatacagcgttccaccagaagatgccggagaaagcctatttgtacgcaatcccctatgagtactacgagaaatataaaattcgccgctatgggtttcatggaacctcacatcgttatgtgagtaaacgtgctgcggaaattatgggcaaaccgtacgatcagctcaagatcattaccgttcacgtgggtaacggcgcatcagttgcggcggtgaagaatggcgtatctgttgacacttccatgggtttcacaccacttgaaggtcttgtcatgggcacgcgcagcggcgatattgatccggccatcgtggaatttcttgagaaagaagaaggattgtcggccaaagaagtcgtcaacatcctcaacaagaaatctggtgtgtatgggctcaccaaaggctttagtagtgacatgcgtgacattgaagatcgggctattgaaggtgatcctgtatgccgccttgcattagatgtgtacgaatatcgtatcgcgaaatatattggcgcatacgctgcggccatgaacggtgttgacgcgatcgtctttaccgcaggagttggcgaaaatagcccgattatgcgcgaagaaattattgagaactacttgggctacttagggatcaagatcgataaagaagccaatgacttcaaaggtgaggagaagatcatttcaacgcccgattccaaagtgattgcgatggtagttccgaccaacgaggagctcatgatcgccaaagacacgaaagaaatcattgagaaagggttggacgagcttaagatc

SEQ ID NO: 514 - protein, 417 aa, synthetic construct
  REGION 1..417: note = Variant of acetate kinase
MHHHHHHGGSGMKVLVINSGSSSIKYQLLDMTNEKVLAKGLVERIGIDGSRIVHKVNGEKHVLEHEIKNHEIGLKLVLDLLTDEKYGVLKDLKEIDAVGHRVVHGGERFASSVKITDEVLKTIETLSFLAPLHNPANIMGIKSSMKVLPGVPQVAVFDTAFHQKMPEKAYLYAIPYEYYEKYKIRRYGFHGTSHRYVSKRAAEIMGKPYDQLKIITVHVGNGASVAAVKNGVSVDTSMGFTPLEGLVMGTRSGDIDPAIVEFLEKEEGLSAKEVVNILNKKSGVYGLTKGFSSDMRDIEDRAIEGDPVCRLALDVYEYRIAKYIGAYAAAMNGVDAIVFTAGVGENSPIMREEIIENYLGYLGIKIDKEANDFKGEEKIISTPDSKVIAMVVPTNEELMIAKDTKEIIEKGLDELKI

SEQ ID NO: 515 - DNA, 1251 bp, synthetic construct
  misc_feature 1..1251: note = Variant of acetate kinase
  source 1..1251: mol_type = other DNA
atgcaccatcatcatcatcatggcggtagcggcatgaaagttctggtgattaattctggtagctcctccatcaaatatcagctcctcgatatgaccaacgaaaaggtattagcgaaaggcttggtcgagcgcattggcatcgacggttcgcgtatcgtgcataaagttaacggcgaaaaacacgtgctggaacatgagattaagaatcacgaaattggacttaaattggtcctggatcttcttacggacgaaaaatacggtgtgttgaaggatctcaaagaaatcgatgcagttgggcatcgcgtagtacatggcggcgagcgttttgccagtagcgtgaagattactgacgaagtcttaaagaccatcgagacgttgtcgttcttagctccgttacacaatccagcgaacattatgggtatcaaggggagcatgaaagtgttaccgggtgtgcctcaagttgccgtctttgatacagcgttccaccagaagatgccggagaaagcctatttgtacgcaatcccctatgagtactacgagaaatataaaattcgccgctatgggtttcatggaacctcacatcgttatgtgagtaaacgtgctgcggaaattatgggcaaaccgtacgatcagctcaagatcattaccgttcacgtgggtaacggcgcatcagttgcggcggtgaagaatggcgtatctgttgacacttccatgggtttcacaccacttgaaggtcttgtcatgggcacgcgcagcggcgatattgatccggccatcgtggaatttcttgagaaagaagaaggattgtcggccaaagaagtcgtcaacatcctcaacaagaaatctggtgtgtatgggctcaccaaaggctttagtagtgacatgcgtgacattgaagataatgctattgaaggtgatcctgtatgccgccttgcattagatgtgtacgaatatcgtatcgcgaaatatattggcgcatacgctgcggccatgaacggtgttgacgcgatcgtctttaccgcaggagttggcgaaaatagcccgattatgcgcgaagaaattattgagaactacttgggctacttagggatcaagatcgataaagaagccaatgacttcaaaggtgaggagaagatcatttcaacgcccgattccaaagtgattgcgatggtagttccgaccaacgaggagctcatgatcgccaaagacacgaaagaaatcattgagaaagggttggacgagcttaagatc

SEQ ID NO: 516 - protein, 417 aa, synthetic construct
  REGION 1..417: note = Variant of acetate kinase
MHHHHHHGGSGMKVLVINSGSSSIKYQLLDMTNEKVLAKGLVERIGIDGSRIVHKVNGEKHVLEHEIKNHEIGLKLVLDLLTDEKYGVLKDLKEIDAVGHRVVHGGERFASSVKITDEVLKTIETLSFLAPLHNPANIMGIKGSMKVLPGVPQVAVFDTAFHQKMPEKAYLYAIPYEYYEKYKIRRYGFHGTSHRYVSKRAAEIMGKPYDQLKIITVHVGNGASVAAVKNGVSVDTSMGFTPLEGLVMGTRSGDIDPAIVEFLEKEEGLSAKEVVNILNKKSGVYGLTKGFSSDMRDIEDNAIEGDPVCRLALDVYEYRIAKYIGAYAAAMNGVDAIVFTAGVGENSPIMREEIIENYLGYLGIKIDKEANDFKGEEKIISTPDSKVIAMVVPTNEELMIAKDTKEIIEKGLDELKI

SEQ ID NO: 517 - DNA, 1251 bp, synthetic construct
  misc_feature 1..1251: note = Variant of acetate kinase
  source 1..1251: mol_type = other DNA
atgcaccatcatcatcatcatggcggtagcggcatgaaagttctggtgattaattctggtagctcctccatcaaatatcagctcctcgatatgaccaacgaaaaggtattagcgaaaggcttggtcgagcgcattggcatcgacggttcgcgtatcgtgcataaagttaacggcgaaaaacacgtgctggaacatgagattaagaatcacgaaattggacttaaattggtcctggatcttcttacggacgaaaaatacggtgtgttgaaggatctcaaagaaatcgatgcagttgggcatcgcgtagtacatggcggcgagcgttttgccagtagcgtgaagattactgacgaagtcttaaagaccatcgagacgttgtcgttcttagctccgttacacaatccagcgaacattatgggtatcaagagcagcatgaaagtgttaccgggtgtgcctcaagttgccgtctttgatacagcgttccaccagaagatgccggagaaagcctatttgtacgcaatcccctatgagtactacgagaaatataaaattcgccgctatgggtttcatggaacctcacatcgttatgtgagtaaacgtgctgcggaaattatgggcaaaccgtacgatcagctcaagatcattaccgttcacgtgggtaacggcgcatcagttgcggcggtgaagaatggcgtatctgttgacacttccatgggtttcacaccacttgaaggtcttgtcatgggcacgcgcagcggcgatattgatccggccatcgtggaatttcttgagaaagaagaaggattgtcggccaaagaagtcgtcaacatcctcaacaagaaatctggtgtgtatgggctcaccaaaggctttagtagtgacatgcgtgacattgaagataatgctattgaaggtgatcctgtatgccgccttgcattagatgtgtacgaatatcgtatcgcgaaatatattggcgcatacgctgcggccatgaacggtgttgacgcgatcgtctttaccgcaggagttggcgaaaatagcccgattatgcgcgaagaaattattgagaactacttgggctacttagggatcaagatcgataaagaagccaatgacttcaaaggtgaggagaagatcatttcaacgcccgattccaaagtgattgcgatggtagttccgaccgcggaggagctcatgatcgccaaagacacgaaagaaatcattgagaaagggttggacgagcttaagatc

SEQ ID NO: 518 - protein, 417 aa, synthetic construct
  REGION 1..417: note = Variant of acetate kinase
MHHHHHHGGSGMKVLVINSGSSSIKYQLLDMTNEKVLAKGLVERIGIDGSRIVHKVNGEKHVLEHEIKNHEIGLKLVLDLLTDEKYGVLKDLKEIDAVGHRVVHGGERFASSVKITDEVLKTIETLSFLAPLHNPANIMGIKSSMKVLPGVPQVAVFDTAFHQKMPEKAYLYAIPYEYYEKYKIRRYGFHGTSHRYVSKRAAEIMGKPYDQLKIITVHVGNGASVAAVKNGVSVDTSMGFTPLEGLVMGTRSGDIDPAIVEFLEKEEGLSAKEVVNILNKKSGVYGLTKGFSSDMRDIEDNAIEGDPVCRLALDVYEYRIAKYIGAYAAAMNGVDAIVFTAGVGENSPIMREEIIENYLGYLGIKIDKEANDFKGEEKIISTPDSKVIAMVVPTAEELMIAKDTKEIIEKGLDELKI

SEQ ID NO: 519 - DNA, 1251 bp, synthetic construct
  misc_feature 1..1251: note = Variant of acetate kinase
  source 1..1251: mol_type = other DNA
atgcaccatcatcatcatcatggcggtagcggcatgaaagttctggtgattaattctggtagctcctccatcaaatatcagctcctcgatatgaccaacgaaaaggtattagcgaaaggcttggtcgagcgcattggcatcgacggttcgcgtatcgtgcataaagttaacggcgaaaaacacgtgctggaacatgagattaagaatcacgaaattggacttaaattggtcctggatcttcttacggacgaaaaatacggtgtgttgaaggatctcaaagaaatcgatgcagttgggcatcgcgtagtacatggcggcgagcgttttgccagtagcgtgaagattactgacgaagtcttaaagaccatcgagacgttgtcgttcttagctccgttacacaatccagcgaacattatgggtatcaagagcagcatgaaagtgttaccgggtgtgcctcaagttgccgtctttgatacagcgttccaccagaagatgccggagaaagcctatttgtacgcaatcccctatgagtactacgagaaatataaaattcgccgctatgggtttcatggaacctcacatcgttatgtgagtaaacgtgctgcggaaattatgggcaaaccgtacgatcagctcaagatcattaccatgcacgtgggtaacggcgcatcagttgcggcggtgaagaatggcgtatctgttgacacttccatgggtttcacaccacttgaaggtcttgtcatgggcacgcgcagcggcgatattgatccggccatcgtggaatttcttgagaaagaagaaggattgtcggccaaagaagtcgtcaacatcctcaacaagaaatctggtgtgtatgggctcaccaaaggctttagtagtgacatgcgtgacattgaagataatgctattgaaggtgatcctgtatgccgccttgcattagatgtgtacgaatatcgtatcgcgaaatatattggcgcatacgctgcggccatgaacggtgttgacgcgatcgtctttaccgcaggagttggcgaaaatagcccgattatgcgcgaagaaattattgagaactacttgggctacttagggatcaagatcgataaagaagccaatgacttcaaaggtgaggagaagatcatttcaacgcccgattccaaagtgattgcgatggtagttccgaccaacgaggagctcatgatcgccaaagacacgaaagaaatcattgagaaagggttggacgagcttaagatc

SEQ ID NO: 520 - protein, 417 aa, synthetic construct
  REGION 1..417: note = Variant of acetate kinase
MHHHHHHGGSGMKVLVINSGSSSIKYQLLDMTNEKVLAKGLVERIGIDGSRIVHKVNGEKHVLEHEIKNHEIGLKLVLDLLTDEKYGVLKDLKEIDAVGHRVVHGGERFASSVKITDEVLKTIETLSFLAPLHNPANIMGIKSSMKVLPGVPQVAVFDTAFHQKMPEKAYLYAIPYEYYEKYKIRRYGFHGTSHRYVSKRAAEIMGKPYDQLKIITMHVGNGASVAAVKNGVSVDTSMGFTPLEGLVMGTRSGDIDPAIVEFLEKEEGLSAKEVVNILNKKSGVYGLTKGFSSDMRDIEDNAIEGDPVCRLALDVYEYRIAKYIGAYAAAMNGVDAIVFTAGVGENSPIMREEIIENYLGYLGIKIDKEANDFKGEEKIISTPDSKVIAMVVPTNEELMIAKDTKEIIEKGLDELKI

SEQ ID NO: 521 - DNA, 1251 bp, synthetic construct
  misc_feature 1..1251: note = Variant of acetate kinase
  source 1..1251: mol_type = other DNA
atgcaccatcatcatcatcatggcggtagcggcatgaaagttctggtgattaattctggtagctcctccatcaaatatcagctcctcgatatgaccaacgaaaaggtattagcgaaaggcttggtcgagcgcattggcatcgacggttcgcgtatcgtgcataaagttaacggcgaaaaacacgtgctggaacatgagattaagaatcacgaaattggacttaaattggtcctggatcttcttacggacgaaaaatacggtgtgttgaaggatctcaaagaaatcgatgcagttgggcatcgcgtagtacatggcggcgagcgttttgccagtagcgtgaagattactgacgaagtcttaaagaccatcgagacgttgtcgttcttagctccgttacacaatccagcgaacattatgggtatcaagagcagcatgaaagtgttaccgggtgtgcctcaagttgccgtctttgatacagcgttccaccagaagatgccggagaaagcctatttgtacgcaatcccctatgagtactacgagaaatataaaattcgccgctatgggtttcatggaacctcacatcgttatgtgagtaaacgtgctgcggaaattatgggcaaaccgtacgatcagctcaagatcattaccgttcacgtgggtaacggcgcatcagttgcggcggtgaagaatggcgtatctgttgacacttccatgggtttcacaccacttgaaggtcttgtcatgggcacgcgcagcggcgatattgatccggccatcgtggaatttcttgagaaagaagaaggattgtcggccaaagaagtcgtcaacatcctcaacaagaaatctggtgtgtatgggctcaccaaaggctttagtagtgacatgcgtgacattgaagataatgctattgaaggtgatcctgtatgccgccttgcattagatgtgtacgaatatcgtatcgcgaaatatattggcgcatacgctgcggccatgaacggtgttgacgcgatcgtctttaccgcaggagttggcgaaaatagcccgattatgcgcgaagaaattattgagaactacttgggctacttagggatcaagatcgataaagaagccaatgacttcaaaggttctgagaagatcatttcaacgcccgattccaaagtgattgcgatggtagttccgaccaacgaggagctcatgatcgccaaagacacgaaagaaatcattgagaaagggttggacgagcttaagatc

SEQ ID NO: 522 - protein, 417 aa, synthetic construct
  REGION 1..417: note = Variant of acetate kinase
MHHHHHHGGSGMKVLVINSGSSSIKYQLLDMTNEKVLAKGLVERIGIDGSRIVHKVNGEKHVLEHEIKNHEIGLKLVLDLLTDEKYGVLKDLKEIDAVGHRVVHGGERFASSVKITDEVLKTIETLSFLAPLHNPANIMGIKSSMKVLPGVPQVAVFDTAFHQKMPEKAYLYAIPYEYYEKYKIRRYGFHGTSHRYVSKRAAEIMGKPYDQLKIITVHVGNGASVAAVKNGVSVDTSMGFTPLEGLVMGTRSGDIDPAIVEFLEKEEGLSAKEVVNILNKKSGVYGLTKGFSSDMRDIEDNAIEGDPVCRLALDVYEYRIAKYIGAYAAAMNGVDAIVFTAGVGENSPIMREEIIENYLGYLGIKIDKEANDFKGSEKIISTPDSKVIAMVVPTNEELMIAKDTKEIIEKGLDELKI

SEQ ID NO: 523 - DNA, 1251 bp, synthetic construct
  misc_feature 1..1251: note = Variant of acetate kinase
  source 1..1251: mol_type = other DNA
atgcaccatcatcatcatcatggcggtagcggcatgaaagttctggtgattaattctggtagctcctccatcaaatatcagctcctcgatatgaccaacgaaaaggtattagcgaaaggcttggtcgagcgcattggcatcgacggttcgcgtatcgtgcataaagttaacggcgaaaaacacgtgctggaacatgagattaagaatcacgaaattggacttaaattggtcctggatagtcttacggacgaaaaatacggtgtgttgaaggatctcaaagaaatcgatgcagttgggcatcgcgtagtacatggcggcgagcgttttgccagtagcgtgaagattactgacgaagtcttaaagaccatcgagacgttgtcgttcttagctccgttacacaatccagcgaacattatgggtatcaagagcagcatgaaagtgttaccgggtgtgcctcaagttgccgtctttgatacagcgttccaccagaagatgccggagaaagcctatttgtacgcaatcccctatgagtactacgagaaatataaaattcgccgctatgggtttcatggaacctcacatcgttatgtgagtaaacgtgctgcggaaattatgggcaaaccgtacgatcagctcaagatcattaccgttcacgtgggtaacggcgcatcagttgcggcggtgaagaatggcgtatctgttgacacttccatgggtttcacaccacttgaaggtcttgtcatgggcacgcgcagcggcgatattgatccggccatcgtggaatttcttgagaaagaagaaggattgtcggccaaagaagtcgtcaacatcctcaacaagaaatctggtgtgtatgggctcaccaaaggctttagtagtgacatgcgtgacattgaagataatgctattgaaggtgatcctgtatgccgccttgcattagatgtgtacgaatatcgtatcgcgaaatatattggcgcatacgctgcggccatgaacggtgttgacgcgatcgtctttaccgcaggagttggcgaaaatagcccgattatgcgcgaagaaattattgagaactacttgggctacttagggatcaagatcgataaagaagccaatgacttcaaaggtgaggagaagatcatttcaacgcccgattccaaagtgattgcgatggtagttccgaccaacgaggagctcatgatcgccaaagacacgaaagaaatcattgagaaagggttggacgagcttaagatc

SEQ ID NO: 524 - protein, 417 aa, synthetic construct
  REGION 1..417: note = Variant of acetate kinase
MHHHHHHGGSGMKVLVINSGSSSIKYQLLDMTNEKVLAKGLVERIGIDGSRIVHKVNGEKHVLEHEIKNHEIGLKLVLDSLTDEKYGVLKDLKEIDAVGHRVVHGGERFASSVKITDEVLKTIETLSFLAPLHNPANIMGIKSSMKVLPGVPQVAVFDTAFHQKMPEKAYLYAIPYEYYEKYKIRRYGFHGTSHRYVSKRAAEIMGKPYDQLKIITVHVGNGASVAAVKNGVSVDTSMGFTPLEGLVMGTRSGDIDPAIVEFLEKEEGLSAKEVVNILNKKSGVYGLTKGFSSDMRDIEDNAIEGDPVCRLALDVYEYRIAKYIGAYAAAMNGVDAIVFTAGVGENSPIMREEIIENYLGYLGIKIDKEANDFKGEEKIISTPDSKVIAMVVPTNEELMIAKDTKEIIEKGLDELKI

SEQ ID NO: 525 - DNA, 1251 bp, synthetic construct
  misc_feature 1..1251: note = Variant of acetate kinase
  source 1..1251: mol_type = other DNA
atgcaccatcatcatcatcatggcggtagcggcatgaaagttctggtgattaattctggtagctcctccatcaaatatcagctcctcgatatgaccaacgaaaaggtattagcgaaaggcttggtcgagcgcattggcatcgacggttcgcgtatcgtgcataaagttaacggcgaaaaacacgtgctggaacatgagattaagaatcacgaaattggacttaaattggtcctggatcttcttacggacgaaaaatacggtgtgttgaaggatctcaaagaaatcgatgcagttgggcatcgcgtagtacatggcggcgagcgttttgccagtagcgtgaagattactgacgaagtcttaaagaccatcgagacgttgtcgttcttagctccgttacacaatccagcgaacattcggggtatcaagagcagcatgaaagtgttaccgggtgtgcctcaagttgccgtctttgatacagcgttccaccagaagatgccggagaaagcctatttgtacgcaatcccctatgagtactacgagaaatataaaattcgccgctatgggtttcatggaacctcacatcgttatgtgagtaaacgtgctgcggaaattatgggcaaaccgtacgatcagctcaagatcattaccgttcacgtgggtaacggcgcatcagttgcggcggtgaagaatggcgtatctgttgacacttccatgggtttcacaccacttgaaggtcttgtcatgggcacgcgcagcggcgatattgatccggccatcgtggaatttcttgagaaagaagaaggattgtcggccaaagaagtcgtcaacatcctcaacaagaaatctggtgtgtatgggctcaccaaaggctttagtagtgacatgcgtgacattgaagataatgctattgaaggtgatcctgtatgccgccttgcattagatgtgtacgaatatcgtatcgcgaaatatattggcgcatacgctgcggccatgaacggtgttgacgcgatcgtctttaccgcaggagttggcgaaaatagcccgattatgcgcgaagaaattattgagaactacttgggctacttagggatcaagatcgataaagaagccaatgacttcaaaggtgaggagaagatcatttcaacgcccgattccaaagtgattgcgatggtagttccgaccaacgaggagctcatgatcgccaaagacacgaaagaaatcattgagaaagggttggacgagcttaagatc

SEQ ID NO: 526 - protein, 417 aa, synthetic construct
  REGION 1..417: note = Variant of acetate kinase
MHHHHHHGGSGMKVLVINSGSSSIKYQLLDMTNEKVLAKGLVERIGIDGSRIVHKVNGEKHVLEHEIKNHEIGLKLVLDLLTDEKYGVLKDLKEIDAVGHRVVHGGERFASSVKITDEVLKTIETLSFLAPLHNPANIRGIKSSMKVLPGVPQVAVFDTAFHQKMPEKAYLYAIPYEYYEKYKIRRYGFHGTSHRYVSKRAAEIMGKPYDQLKIITVHVGNGASVAAVKNGVSVDTSMGFTPLEGLVMGTRSGDIDPAIVEFLEKEEGLSAKEVVNILNKKSGVYGLTKGFSSDMRDIEDNAIEGDPVCRLALDVYEYRIAKYIGAYAAAMNGVDAIVFTAGVGENSPIMREEIIENYLGYLGIKIDKEANDFKGEEKIISTPDSKVIAMVVPTNEELMIAKDTKEIIEKGLDELKI

SEQ ID NO: 527 - DNA, 1251 bp, synthetic construct
  misc_feature 1..1251: note = Variant of acetate kinase
  source 1..1251: mol_type = other DNA
atgcaccatcatcatcatcatggcggtagcggcatgaaagttctggtgattaattctggtagctcctccatcaaatatcagctcctcgatatgaccaacgaaaaggtattagcgaaaggcttggtcgagcgcattggcatcgacggttcgcgtatcgtgcataaagttaacggcgaaaaacacgtgctggaacatgagattaagaatcacgaaattggacttaaattggtcctggatcttcttacggacgaaaaatacggtgtgttgaaggatctcaaagaaatcgatgcagttgggcatcgcgtagtacatggcggcgagcgttttgccagtagcgtgaagattactgacgaagtcttaaagaccatcgagacgttgtcgttcttagctccgttacacaatccagcgaacattatgggtatcaagagcagcatgaaagtgttaccgggtgtgcctcaagttgccgtctttgatacagcgttccaccagaagatgccggagaaagcctatttgtacgcaatcccctatgagtactacgagaaatataaaattcgccgctatgggtttcatggaacctcacatcgttatgtgagtaaacgtgctgcggaaattatgggcaaaccgtacgatcagctcaagatcattacccttcacgtgggtaacggcgcatcagttgcggcggtgaagaatggcgtatctgttgacacttccatgggtttcacaccacttgaaggtcttgtcatgggcacgcgcagcggcgatattgatccggccatcgtggaatttcttgagaaagaagaaggattgtcggccaaagaagtcgtcaacatcctcaacaagaaatctggtgtgtatgggctcaccaaaggctttagtagtgacatgcgtgacattgaagataatgctattgaaggtgatcctgtatgccgccttgcattagatgtgtacgaatatcgtatcgcgaaatatattggcgcatacgctgcggccatgaacggtgttgacgcgatcgtctttaccgcaggagttggcgaaaatagcccgattatgcgcgaagaaattattgagaactacttgggctacttagggatcaagatcgataaagaagccaatgacttcaaaggtgaggagaagatcatttcaacgcccgattccaaagtgattgcgatggtagttccgaccaacgaggagctcatgatcgccaaagacacgaaagaaatcattgagaaagggttggacgagcttaagatc

SEQ ID NO: 528 - protein, 417 aa, synthetic construct
  REGION 1..417: note = Variant of acetate kinase
MHHHHHHGGSGMKVLVINSGSSSIKYQLLDMTNEKVLAKGLVERIGIDGSRIVHKVNGEKHVLEHEIKNHEIGLKLVLDLLTDEKYGVLKDLKEIDAVGHRVVHGGERFASSVKITDEVLKTIETLSFLAPLHNPANIMGIKSSMKVLPGVPQVAVFDTAFHQKMPEKAYLYAIPYEYYEKYKIRRYGFHGTSHRYVSKRAAEIMGKPYDQLKIITLHVGNGASVAAVKNGVSVDTSMGFTPLEGLVMGTRSGDIDPAIVEFLEKEEGLSAKEVVNILNKKSGVYGLTKGFSSDMRDIEDNAIEGDPVCRLALDVYEYRIAKYIGAYAAAMNGVDAIVFTAGVGENSPIMREEIIENYLGYLGIKIDKEANDFKGEEKIISTPDSKVIAMVVPTNEELMIAKDTKEIIEKGLDELKI

SEQ ID NO: 529 - DNA, 1251 bp, synthetic construct
  misc_feature 1..1251: note = Variant of acetate kinase
  source 1..1251: mol_type = other DNA
atgcaccatcatcatcatcatggcggtagcggcatgaaagttctggtgattaattctggtagctcctccatcaaatatcagctcctcgatatgaccaacgaaaaggtattagcgaaaggcttggtcgagcgcattggcatcgacggttcgcgtatcgtgcataaagttaacggcgaaaaacacgtgctgctgcatgagattaagaatcacgaaattggacttaaattggtcctggatcttcttacggacgaaaaatacggtgtgttgaaggatctcaaagaaatcgatgcagttgggcatcgcgtagtacatggcggcgagcgttttgccagtagcgtgaagattactgacgaagtcttaaagaccatcgagacgttgtcgttcttagctccgttacacaatccagcgaacattatgggtatcaagagcagcatgaaagtgttaccgggtgtgcctcaagttgccgtctttgatacagcgttccaccagaagatgccggagaaagcctatttgtacgcaatcccctatgagtactacgagaaatataaaattcgccgctatgggtttcatggaacctcacatcgttatgtgagtaaacgtgctgcggaaattatgggcaaaccgtacgatcagctcaagatcattaccgttcacgtgggtaacggcgcatcagttgcggcggtgaagaatggcgtatctgttgacacttccatgggtttcacaccacttgaaggtcttgtcatgggcacgcgcagcggcgatattgatccggccatcgtggaatttcttgagaaagaagaaggattgtcggccaaagaagtcgtcaacatcctcaacaagaaatctggtgtgtatgggctcaccaaaggctttagtagtgacatgcgtgacattgaagataatgctattgaaggtgatcctgtatgccgccttgcattagatgtgtacgaatatcgtatcgcgaaatatattggcgcatacgctgcggccatgaacggtgttgacgcgatcgtctttaccgcaggagttggcgaaaatagcccgattatgcgcgaagaaattattgagaactacttgggctacttagggatcaagatcgataaagaagccaatgacttcaaaggtgaggagaagatcatttcaacgcccgattccaaagtgattgcgatggtagttccgaccaacgaggagctcatgatcgccaaagacacgaaagaaatcattgagaaagggttggacgagcttaagatc

SEQ ID NO: 530 - protein, 417 aa, synthetic construct
  REGION 1..417: note = Variant of acetate kinase
MHHHHHHGGSGMKVLVINSGSSSIKYQLLDMTNEKVLAKGLVERIGIDGSRIVHKVNGEKHVLLHEIKNHEIGLKLVLDLLTDEKYGVLKDLKEIDAVGHRVVHGGERFASSVKITDEVLKTIETLSFLAPLHNPANIMGIKSSMKVLPGVPQVAVFDTAFHQKMPEKAYLYAIPYEYYEKYKIRRYGFHGTSHRYVSKRAAEIMGKPYDQLKIITVHVGNGASVAAVKNGVSVDTSMGFTPLEGLVMGTRSGDIDPAIVEFLEKEEGLSAKEVVNILNKKSGVYGLTKGFSSDMRDIEDNAIEGDPVCRLALDVYEYRIAKYIGAYAAAMNGVDAIVFTAGVGENSPIMREEIIENYLGYLGIKIDKEANDFKGEEKIISTPDSKVIAMVVPTNEELMIAKDTKEIIEKGLDELKI

SEQ ID NO: 531 - DNA, 1251 bp, synthetic construct
  misc_feature 1..1251: note = Variant of acetate kinase
  source 1..1251: mol_type = other DNA
atgcaccatcatcatcatcatggcggtagcggcatgaaagttctggtgattaattctggtagctcctccatcaaatatcagctcctcgatatgaccaacgaaaaggtattagcgaaaggcttggtcgagcgcattggcatcgacggttcgcgtatcgtgcataaagttaacggcgaaaaacacgtgctgcggcatgagattaagaatcacgaaattggacttaaattggtcctggatcttcttacggacgaaaaatacggtgtgttgaaggatctcaaagaaatcgatgcagttgggcatcgcgtagtacatggcggcgagcgttttgccagtagcgtgaagattactgacgaagtcttaaagaccatcgagacgttgtcgttcttagctccgttacacaatccagcgaacattatgggtatcaagagcagcatgaaagtgttaccgggtgtgcctcaagttgccgtctttgatacagcgttccaccagaagatgccggagaaagcctatttgtacgcaatcccctatgagtactacgagaaatataaaattcgccgctatgggtttcatggaacctcacatcgttatgtgagtaaacgtgctgcggaaattatgggcaaaccgtacgatcagctcaagatcattaccgttcacgtgggtaacggcgcatcagttgcggcggtgaagaatggcgtatctgttgacacttccatgggtttcacaccacttgaaggtcttgtcatgggcacgcgcagcggcgatattgatccggccatcgtggaatttcttgagaaagaagaaggattgtcggccaaagaagtcgtcaacatcctcaacaagaaatctggtgtgtatgggctcaccaaaggctttagtagtgacatgcgtgacattgaagataatgctattgaaggtgatcctgtatgccgccttgcattagatgtgtacgaatatcgtatcgcgaaatatattggcgcatacgctgcggccatgaacggtgttgacgcgatcgtctttaccgcaggagttggcgaaaatagcccgattatgcgcgaagaaattattgagaactacttgggctacttagggatcaagatcgataaagaagccaatgacttcaaaggtgaggagaagatcatttcaacgcccgattccaaagtgattgcgatggtagttccgaccaacgaggagctcatgatcgccaaagacacgaaagaaatcattgagaaagggttggacgagcttaagatc

SEQ ID NO: 532 - protein, 417 aa, synthetic construct
  REGION 1..417: note = Variant of acetate kinase
MHHHHHHGGSGMKVLVINSGSSSIKYQLLDMTNEKVLAKGLVERIGIDGSRIVHKVNGEKHVLRHEIKNHEIGLKLVLDLLTDEKYGVLKDLKEIDAVGHRVVHGGERFASSVKITDEVLKTIETLSFLAPLHNPANIMGIKSSMKVLPGVPQVAVFDTAFHQKMPEKAYLYAIPYEYYEKYKIRRYGFHGTSHRYVSKRAAEIMGKPYDQLKIITVHVGNGASVAAVKNGVSVDTSMGFTPLEGLVMGTRSGDIDPAIVEFLEKEEGLSAKEVVNILNKKSGVYGLTKGFSSDMRDIEDNAIEGDPVCRLALDVYEYRIAKYIGAYAAAMNGVDAIVFTAGVGENSPIMREEIIENYLGYLGIKIDKEANDFKGEEKIISTPDSKVIAMVVPTNEELMIAKDTKEIIEKGLDELKI

SEQ ID NO: 533 - DNA, 1251 bp, synthetic construct
  misc_feature 1..1251: note = Variant of acetate kinase
  source 1..1251: mol_type = other DNA
atgcaccatcatcatcatcatggcggtagcggcatgaaagttctggtgattaattctggtagctcctccatcaaatatcagctcctcgatatgaccaacgaaaaggtattagcgaaaggcttggtcgagcgcattggcatcgacggttcgcgtatcgtgcataaagttaacggcgaaaaacacgtgctgaagcatgagattaagaatcacgaaattggacttaaattggtcctggatcttcttacggacgaaaaatacggtgtgttgaaggatctcaaagaaatcgatgcagttgggcatcgcgtagtacatggcggcgagcgttttgccagtagcgtgaagattactgacgaagtcttaaagaccatcgagacgttgtcgttcttagctccgttacacaatccagcgaacattatgggtatcaagagcagcatgaaagtgttaccgggtgtgcctcaagttgccgtctttgatacagcgttccaccagaagatgccggagaaagcctatttgtacgcaatcccctatgagtactacgagaaatataaaattcgccgctatgggtttcatggaacctcacatcgttatgtgagtaaacgtgctgcggaaattatgggcaaaccgtacgatcagctcaagatcattaccgttcacgtgggtaacggcgcatcagttgcggcggtgaagaatggcgtatctgttgacacttccatgggtttcacaccacttgaaggtcttgtcatgggcacgcgcagcggcgatattgatccggccatcgtggaatttcttgagaaagaagaaggattgtcggccaaagaagtcgtcaacatcctcaacaagaaatctggtgtgtatgggctcaccaaaggctttagtagtgacatgcgtgacattgaagataatgctattgaaggtgatcctgtatgccgccttgcattagatgtgtacgaatatcgtatcgcgaaatatattggcgcatacgctgcggccatgaacggtgttgacgcgatcgtctttaccgcaggagttggcgaaaatagcccgattatgcgcgaagaaattattgagaactacttgggctacttagggatcaagatcgataaagaagccaatgacttcaaaggtgaggagaagatcatttcaacgcccgattccaaagtgattgcgatggtagttccgaccaacgaggagctcatgatcgccaaagacacgaaagaaatcattgagaaagggttggacgagcttaagatc

SEQ ID NO: 534 - protein, 417 aa, synthetic construct
  REGION 1..417: note = Variant of acetate kinase
MHHHHHHGGSGMKVLVINSGSSSIKYQLLDMTNEKVLAKGLVERIGIDGSRIVHKVNGEKHVLKHEIKNHEIGLKLVLDLLTDEKYGVLKDLKEIDAVGHRVVHGGERFASSVKITDEVLKTIETLSFLAPLHNPANIMGIKSSMKVLPGVPQVAVFDTAFHQKMPEKAYLYAIPYEYYEKYKIRRYGFHGTSHRYVSKRAAEIMGKPYDQLKIITVHVGNGASVAAVKNGVSVDTSMGFTPLEGLVMGTRSGDIDPAIVEFLEKEEGLSAKEVVNILNKKSGVYGLTKGFSSDMRDIEDNAIEGDPVCRLALDVYEYRIAKYIGAYAAAMNGVDAIVFTAGVGENSPIMREEIIENYLGYLGIKIDKEANDFKGEEKIISTPDSKVIAMVVPTNEELMIAKDTKEIIEKGLDELKI

SEQ ID NO: 535 - DNA, 1251 bp, synthetic construct
  misc_feature 1..1251: note = Variant of acetate kinase
  source 1..1251: mol_type = other DNA
atgcaccatcatcatcatcatggcggtagcggcatgaaagttctggtgattaattctggtagctcctccatcaaatatcagctcctcgatatgaccaacgaaaaggtattagcgaaaggcttggtcgagcgcattggcatcgacggttcgcgtatcgtgcataaagttaacggcgaaaaacacgtgctggaacatgagattaagaatcacgaaattggacttaaattggtcctggatcttcttacggacgaaaaatacggtgtgttgaaggatctcaaagaaatcgatgcagttgggcatcgcgtagtacatggcggcgagcgttttgccagtagcgtgaagattactgacgaagtcttaaagaccatcgagacgttgtcgttcttagctccgttacacaatccagcgaacattatgggtatcaagagcagcatgaaagtgttaccgggtgtgcctcaagttgccgtctttgatacagcgttccaccagaagatgccggagaaagcctatttgtacgcaatcccctatgagtactacgagaaatataaaattcgccgctatgggtttcatggaacctcacatcgttatgtgagtaaacgtgctgcggaaattatgggcaaaccgtacgatcagctcaagatcattaccgttcacgtgggtaacggcgcatcagttgcggcggtgaagaatggcgtatctgttgacacttccatgggtttcacaccacttgaaggtcttgtcgggggcacgcgcagcggcgatattgatccggccatcgtggaatttcttgagaaagaagaaggattgtcggccaaagaagtcgtcaacatcctcaacaagaaatctggtgtgtatgggctcaccaaaggctttagtagtgacatgcgtgacattgaagataatgctattgaaggtgatcctgtatgccgccttgcattagatgtgtacgaatatcgtatcgcgaaatatattggcgcatacgctgcggccatgaacggtgttgacgcgatcgtctttaccgcaggagttggcgaaaatagcccgattatgcgcgaagaaattattgagaactacttgggctacttagggatcaagatcgataaagaagccaatgacttcaaaggtgaggagaagatcatttcaacgcccgattccaaagtgattgcgatggtagttccgaccaacgaggagctcatgatcgccaaagacacgaaagaaatcattgagaaagggttggacgagcttaagatc

SEQ ID NO: 536 - protein, 417 aa, synthetic construct
  REGION 1..417: note = Variant of acetate kinase
MHHHHHHGGSGMKVLVINSGSSSIKYQLLDMTNEKVLAKGLVERIGIDGSRIVHKVNGEKHVLEHEIKNHEIGLKLVLDLLTDEKYGVLKDLKEIDAVGHRVVHGGERFASSVKITDEVLKTIETLSFLAPLHNPANIMGIKSSMKVLPGVPQVAVFDTAFHQKMPEKAYLYAIPYEYYEKYKIRRYGFHGTSHRYVSKRAAEIMGKPYDQLKIITVHVGNGASVAAVKNGVSVDTSMGFTPLEGLVGGTRSGDIDPAIVEFLEKEEGLSAKEVVNILNKKSGVYGLTKGFSSDMRDIEDNAIEGDPVCRLALDVYEYRIAKYIGAYAAAMNGVDAIVFTAGVGENSPIMREEIIENYLGYLGIKIDKEANDFKGEEKIISTPDSKVIAMVVPTNEELMIAKDTKEIIEKGLDELKI

SEQ ID NO: 537 - DNA, 1251 bp, synthetic construct
  misc_feature 1..1251: note = Variant of acetate kinase
  source 1..1251: mol_type = other DNA
atgcaccatcatcatcatcatggcggtagcggcatgaaagttctggtgattaattctggtagctcctccatcaaatatcagctcctcgatatgaccaacgaaaaggtattagcgaaaggcttggtcgagcgcattggcatcgacggttcgcgtatcgtgcataaagttaacggcgaaaaacacgtgctggttcatgagattaagaatcacgaaattggacttaaattggtcctggatcttcttacggacgaaaaatacggtgtgttgaaggatctcaaagaaatcgatgcagttgggcatcgcgtagtacatggcggcgagcgttttgccagtagcgtgaagattactgacgaagtcttaaagaccatcgagacgttgtcgttcttagctccgttacacaatccagcgaacattatgggtatcaagagcagcatgaaagtgttaccgggtgtgcctcaagttgccgtctttgatacagcgttccaccagaagatgccggagaaagcctatttgtacgcaatcccctatgagtactacgagaaatataaaattcgccgctatgggtttcatggaacctcacatcgttatgtgagtaaacgtgctgcggaaattatgggcaaaccgtacgatcagctcaagatcattaccgttcacgtgggtaacggcgcatcagttgcggcggtgaagaatggcgtatctgttgacacttccatgggtttcacaccacttgaaggtcttgtcatgggcacgcgcagcggcgatattgatccggccatcgtggaatttcttgagaaagaagaaggattgtcggccaaagaagtcgtcaacatcctcaacaagaaatctggtgtgtatgggctcaccaaaggctttagtagtgacatgcgtgacattgaagataatgctattgaaggtgatcctgtatgccgccttgcattagatgtgtacgaatatcgtatcgcgaaatatattggcgcatacgctgcggccatgaacggtgttgacgcgatcgtctttaccgcaggagttggcgaaaatagcccgattatgcgcgaagaaattattgagaactacttgggctacttagggatcaagatcgataaagaagccaatgacttcaaaggtgaggagaagatcatttcaacgcccgattccaaagtgattgcgatggtagttccgaccaacgaggagctcatgatcgccaaagacacgaaagaaatcattgagaaagggttggacgagcttaagatc

SEQ ID NO: 538 - protein, 417 aa, synthetic construct
  REGION 1..417: note = Variant of acetate kinase
MHHHHHHGGSGMKVLVINSGSSSIKYQLLDMTNEKVLAKGLVERIGIDGSRIVHKVNGEKHVLVHEIKNHEIGLKLVLDLLTDEKYGVLKDLKEIDAVGHRVVHGGERFASSVKITDEVLKTIETLSFLAPLHNPANIMGIKSSMKVLPGVPQVAVFDTAFHQKMPEKAYLYAIPYEYYEKYKIRRYGFHGTSHRYVSKRAAEIMGKPYDQLKIITVHVGNGASVAAVKNGVSVDTSMGFTPLEGLVMGTRSGDIDPAIVEFLEKEEGLSAKEVVNILNKKSGVYGLTKGFSSDMRDIEDNAIEGDPVCRLALDVYEYRIAKYIGAYAAAMNGVDAIVFTAGVGENSPIMREEIIENYLGYLGIKIDKEANDFKGEEKIISTPDSKVIAMVVPTNEELMIAKDTKEIIEKGLDELKI

SEQ ID NO: 539 - DNA, 1251 bp, synthetic construct
  misc_feature 1..1251: note = Variant of acetate kinase
  source 1..1251: mol_type = other DNA
atgcaccatcatcatcatcatggcggtagcggcatgaaagttctggtgattaattctggtagctcctccatcaaatatcagctcctcgatatgaccaacgaaaaggtattagcgaaaggcttggtcgagcgcattggcatcgacggttcgcgtatcgtgcataaagttaacggcgaaaaacacgtgctggaacatgagattaagaatcacgaaattggacttaaattggtcctggatcttcttacggacgaaaaatacggtgtgttgaaggatctcaaagaaatcgatgcagttgggcatcgcgtagtacatggcggcgagcgttttgccagtagcgtgaagattactgacgaagtcttaaagaccatcgagacgttgtcgttcttagctccgttacacaatccagcgaacattatgggtatcaagagcagcatgaaagtgttaccgggtgtgcctcaagttgccgtctttgatacagcgttccaccagaagatgccggagaaagcctatttgtacgcaatcccctatgagtactacgagaaatataaaattcgccgctatgggtttcatggaacctcacatcgttatgtgagtaaacgtgctgcggaaattatgggcaaaccgtacgatcagctcaagatcattaccgttcacgtgggtaacggcgcatcagttgcggcggtgaagaatggcgtatctgttgacacttccatgggtttcacaccacttgaaggtcttgtcatgggcacgcgcagcggcgatattgatccggccatcgtggaatttcttgagaaagaagaaggattgtcggccaaagaagtcgtcaacatcctcaacaagaaatctggtgtgtatgggctcaccaaaggctttagtagtgacttgcgtgacattgaagataatgctattgaaggtgatcctgtatgccgccttgcattagatgtgtacgaatatcgtatcgcgaaatatattggcgcatacgctgcggccatgaacggtgttgacgcgatcgtctttaccgcaggagttggcgaaaatagcccgattatgcgcgaagaaattattgagaactacttgggctacttagggatcaagatcgataaagaagccaatgacttcaaaggtgaggagaagatcatttcaacgcccgattccaaagtgattgcgatggtagttccgaccaacgaggagctcatgatcgccaaagacacgaaagaaatcattgagaaagggttggacgagcttaagatc

SEQ ID NO: 540 - protein, 417 aa, synthetic construct
  REGION 1..417: note = Variant of acetate kinase
MHHHHHHGGSGMKVLVINSGSSSIKYQLLDMTNEKVLAKGLVERIGIDGSRIVHKVNGEKHVLEHEIKNHEIGLKLVLDLLTDEKYGVLKDLKEIDAVGHRVVHGGERFASSVKITDEVLKTIETLSFLAPLHNPANIMGIKSSMKVLPGVPQVAVFDTAFHQKMPEKAYLYAIPYEYYEKYKIRRYGFHGTSHRYVSKRAAEIMGKPYDQLKIITVHVGNGASVAAVKNGVSVDTSMGFTPLEGLVMGTRSGDIDPAIVEFLEKEEGLSAKEVVNILNKKSGVYGLTKGFSSDLRDIEDNAIEGDPVCRLALDVYEYRIAKYIGAYAAAMNGVDAIVFTAGVGENSPIMREEIIENYLGYLGIKIDKEANDFKGEEKIISTPDSKVIAMVVPTNEELMIAKDTKEIIEKGLDELKI

SEQ ID NO: 541 - DNA, 1251 bp, synthetic construct
  misc_feature 1..1251: note = Variant of acetate kinase
  source 1..1251: mol_type = other DNA
atgcaccatcatcatcatcatggcggtagcggcatgaaagttctggtgattaattctggtagctcctccatcaaatatcagctcctcgatatgaccaacgaaaaggtattagcgaaaggcttggtcgagcgcattggcatcgacggttcgcgtatcgtgcataaagttaacggcgaaaaacacgtgctggaacatgagattaagaatcacgaaattggacttaaattggtcctggatcttcttacggacgaaaaatacggtgtgttgaaggatctcaaagaaatcgatgcagttgggcatcgcgtagtacatggcggcgagcgttttgccagtagcgtgaagattactgacgaagtcttaaagaccatcgagacgttgtcgttcttagctccgttacacaatccagcgaacattatgggtatcaagagcagcatgaaagtgttaccgggtgtgcctcaagttgccgtctttgatacagcgttccaccagaagatgccggagaaagcctatttgtacgcaatcccctatgagtactacgagaaatataaaattcgccgctatgggtttcatggaacctcacatcgttatgtgagtaaacgtgctgcggaaattatgggcaaaccgtacgatcagctcaagatcattaccgttcacgtgggtaacggcgcatcagttgcggcggtgaagaatggcgtatctgttgacacttccatgggtttcacaccacttgaaggtcttgtcatgggcacgcgcagcggcgatattgatccggccatcgtggaatttcttgagaaagaagaaggattgtcggccaaagaagtcgtcaacatcctcaacaagaaatctggtgtgttggggctcaccaaaggctttagtagtgacatgcgtgacattgaagataatgctattgaaggtgatcctgtatgccgccttgcattagatgtgtacgaatatcgtatcgcgaaatatattggcgcatacgctgcggccatgaacggtgttgacgcgatcgtctttaccgcaggagttggcgaaaatagcccgattatgcgcgaagaaattattgagaactacttgggctacttagggatcaagatcgataaagaagccaatgacttcaaaggtgaggagaagatcatttcaacgcccgattccaaagtgattgcgatggtagttccgaccaacgaggagctcatgatcgccaaagacacgaaagaaatcattgagaaagggttggacgagcttaagatc

SEQ ID NO: 542 - protein, 417 aa, synthetic construct
  REGION 1..417: note = Variant of acetate kinase
MHHHHHHGGSGMKVLVINSGSSSIKYQLLDMTNEKVLAKGLVERIGIDGSRIVHKVNGEKHVLEHEIKNHEIGLKLVLDLLTDEKYGVLKDLKEIDAVGHRVVHGGERFASSVKITDEVLKTIETLSFLAPLHNPANIMGIKSSMKVLPGVPQVAVFDTAFHQKMPEKAYLYAIPYEYYEKYKIRRYGFHGTSHRYVSKRAAEIMGKPYDQLKIITVHVGNGASVAAVKNGVSVDTSMGFTPLEGLVMGTRSGDIDPAIVEFLEKEEGLSAKEVVNILNKKSGVLGLTKGFSSDMRDIEDNAIEGDPVCRLALDVYEYRIAKYIGAYAAAMNGVDAIVFTAGVGENSPIMREEIIENYLGYLGIKIDKEANDFKGEEKIISTPDSKVIAMVVPTNEELMIAKDTKEIIEKGLDELKI

SEQ ID NO: 543 - DNA, 1251 bp, synthetic construct
  misc_feature 1..1251: note = Variant of acetate kinase
  source 1..1251: mol_type = other DNA
atgcaccatcatcatcatcatggcggtagcggcatgaaagttctggtgattaattctggtagctcctccatcaaatatcagctcctcgatatgaccaacgaaaaggtattagcgaaaggcttggtcgagcgcattggcatcgacggttcgcgtatcgtgcataaagttaacggcgaaaaacacgtgctggaacatgagattaagaatcacgaaattggaagtaaattggtcctggatcttcttacggacgaaaaatacggtgtgttgaaggatctcaaagaaatcgatgcagttgggcatcgcgtagtacatggcggcgagcgttttgccagtagcgtgaagattactgacgaagtcttaaagaccatcgagacgttgtcgttcttagctccgttacacaatccagcgaacattatgggtatcaagagcagcatgaaagtgttaccgggtgtgcctcaagttgccgtctttgatacagcgttccaccagaagatgccggagaaagcctatttgtacgcaatcccctatgagtactacgagaaatataaaattcgccgctatgggtttcatggaacctcacatcgttatgtgagtaaacgtgctgcggaaattatgggcaaaccgtacgatcagctcaagatcattaccgttcacgtgggtaacggcgcatcagttgcggcggtgaagaatggcgtatctgttgacacttccatgggtttcacaccacttgaaggtcttgtcatgggcacgcgcagcggcgatattgatccggccatcgtggaatttcttgagaaagaagaaggattgtcggccaaagaagtcgtcaacatcctcaacaagaaatctggtgtgtatgggctcaccaaaggctttagtagtgacatgcgtgacattgaagataatgctattgaaggtgatcctgtatgccgccttgcattagatgtgtacgaatatcgtatcgcgaaatatattggcgcatacgctgcggccatgaacggtgttgacgcgatcgtctttaccgcaggagttggcgaaaatagcccgattatgcgcgaagaaattattgagaactacttgggctacttagggatcaagatcgataaagaagccaatgacttcaaaggtgaggagaagatcatttcaacgcccgattccaaagtgattgcgatggtagttccgaccaacgaggagctcatgatcgccaaagacacgaaagaaatcattgagaaagggttggacgagcttaagatc

SEQ ID NO: 544 - protein, 417 aa, synthetic construct
  REGION 1..417: note = Variant of acetate kinase
MHHHHHHGGSGMKVLVINSGSSSIKYQLLDMTNEKVLAKGLVERIGIDGSRIVHKVNGEKHVLEHEIKNHEIGSKLVLDLLTDEKYGVLKDLKEIDAVGHRVVHGGERFASSVKITDEVLKTIETLSFLAPLHNPANIMGIKSSMKVLPGVPQVAVFDTAFHQKMPEKAYLYAIPYEYYEKYKIRRYGFHGTSHRYVSKRAAEIMGKPYDQLKIITVHVGNGASVAAVKNGVSVDTSMGFTPLEGLVMGTRSGDIDPAIVEFLEKEEGLSAKEVVNILNKKSGVYGLTKGFSSDMRDIEDNAIEGDPVCRLALDVYEYRIAKYIGAYAAAMNGVDAIVFTAGVGENSPIMREEIIENYLGYLGIKIDKEANDFKGEEKIISTPDSKVIAMVVPTNEELMIAKDTKEIIEKGLDELKI

SEQ ID NO: 545 - DNA, 1251 bp, synthetic construct
  misc_feature 1..1251: note = Variant of acetate kinase
  source 1..1251: mol_type = other DNA
atgcaccatcatcatcatcatggcggtagcggcatgaaagttctggtgattaattctggtagctcctccatcaaatatcagctcctcgatatgaccaacgaaaaggtattagcgaaaggcttggtcgagcgcattggcatcgacggttcgcgtatcgtgcataaagttaacggcgaaaaacacacgctggaacatgagattaagaatcacgaaattggacttaaattggtcctggatcttcttacggacgaaaaatacggtgtgttgaaggatctcaaagaaatcgatgcagttgggcatcgcgtagtacatggcggcgagcgttttgccagtagcgtgaagattactgacgaagtcttaaagaccatcgagacgttgtcgttcttagctccgttacacaatccagcgaacattatgggtatcaagagcagcatgaaagtgttaccgggtgtgcctcaagttgccgtctttgatacagcgttccaccagaagatgccggagaaagcctatttgtacgcaatcccctatgagtactacgagaaatataaaattcgccgctatgggtttcatggaacctcacatcgttatgtgagtaaacgtgctgcggaaattatgggcaaaccgtacgatcagctcaagatcattaccgttcacgtgggtaacggcgcatcagttgcggcggtgaagaatggcgtatctgttgacacttccatgggtttcacaccacttgaaggtcttgtcatgggcacgcgcagcggcgatattgatccggccatcgtggaatttcttgagaaagaagaaggattgtcggccaaagaagtcgtcaacatcctcaacaagaaatctggtgtgtatgggctcaccaaaggctttagtagtgacatgcgtgacattgaagataatgctattgaaggtgatcctgtatgccgccttgcattagatgtgtacgaatatcgtatcgcgaaatatattggcgcatacgctgcggccatgaacggtgttgacgcgatcgtctttaccgcaggagttggcgaaaatagcccgattatgcgcgaagaaattattgagaactacttgggctacttagggatcaagatcgataaagaagccaatgacttcaaaggtgaggagaagatcatttcaacgcccgattccaaagtgattgcgatggtagttccgaccaacgaggagctcatgatcgccaaagacacgaaagaaatcattgagaaagggttggacgagcttaagatc

SEQ ID NO: 546 - protein, 417 aa, synthetic construct
  REGION 1..417: note = Variant of acetate kinase
MHHHHHHGGSGMKVLVINSGSSSIKYQLLDMTNEKVLAKGLVERIGIDGSRIVHKVNGEKHTLEHEIKNHEIGLKLVLDLLTDEKYGVLKDLKEIDAVGHRVVHGGERFASSVKITDEVLKTIETLSFLAPLHNPANIMGIKSSMKVLPGVPQVAVFDTAFHQKMPEKAYLYAIPYEYYEKYKIRRYGFHGTSHRYVSKRAAEIMGKPYDQLKIITVHVGNGASVAAVKNGVSVDTSMGFTPLEGLVMGTRSGDIDPAIVEFLEKEEGLSAKEVVNILNKKSGVYGLTKGFSSDMRDIEDNAIEGDPVCRLALDVYEYRIAKYIGAYAAAMNGVDAIVFTAGVGENSPIMREEIIENYLGYLGIKIDKEANDFKGEEKIISTPDSKVIAMVVPTNEELMIAKDTKEIIEKGLDELKI

SEQ ID NO: 547 - DNA, 1251 bp, synthetic construct
  misc_feature 1..1251: note = Variant of acetate kinase
  source 1..1251: mol_type = other DNA
atgcaccatcatcatcatcatggcggtagcggcatgaaagttctggtgattaattctggtagctcctccatcaaatatcagctcctcgatatgaccaacgaaaaggtattagcgaaaggcttggtcgagcgcattggcatcgacggttcgcgtatcgtgcataaagttaacggcgaaaaacacgtgctggaaattgagattaagaatcacgaaattggacttaaattggtcctggatcttcttacggacgaaaaatacggtgtgttgaaggatctcaaagaaatcgatgcagttgggcatcgcgtagtacatggcggcgagcgttttgccagtagcgtgaagattactgacgaagtcttaaagaccatcgagacgttgtcgttcttagctccgttacacaatccagcgaacattatgggtatcaagagcagcatgaaagtgttaccgggtgtgcctcaagttgccgtctttgatacagcgttccaccagaagatgccggagaaagcctatttgtacgcaatcccctatgagtactacgagaaatataaaattcgccgctatgggtttcatggaacctcacatcgttatgtgagtaaacgtgctgcggaaattatgggcaaaccgtacgatcagctcaagatcattaccgttcacgtgggtaacggcgcatcagttgcggcggtgaagaatggcgtatctgttgacacttccatgggtttcacaccacttgaaggtcttgtcatgggcacgcgcagcggcgatattgatccggccatcgtggaatttcttgagaaagaagaaggattgtcggccaaagaagtcgtcaacatcctcaacaagaaatctggtgtgtatgggctcaccaaaggctttagtagtgacatgcgtgacattgaagataatgctattgaaggtgatcctgtatgccgccttgcattagatgtgtacgaatatcgtatcgcgaaatatattggcgcatacgctgcggccatgaacggtgttgacgcgatcgtctttaccgcaggagttggcgaaaatagcccgattatgcgcgaagaaattattgagaactacttgggctacttagggatcaagatcgataaagaagccaatgacttcaaaggtgaggagaagatcatttcaacgcccgattccaaagtgattgcgatggtagttccgaccaacgaggagctcatgatcgccaaagacacgaaagaaatcattgagaaagggttggacgagcttaagatc

SEQ ID NO: 548 - protein, 417 aa, synthetic construct
  REGION 1..417: note = Variant of acetate kinase
MHHHHHHGGSGMKVLVINSGSSSIKYQLLDMTNEKVLAKGLVERIGIDGSRIVHKVNGEKHVLEIEIKNHEIGLKLVLDLLTDEKYGVLKDLKEIDAVGHRVVHGGERFASSVKITDEVLKTIETLSFLAPLHNPANIMGIKSSMKVLPGVPQVAVFDTAFHQKMPEKAYLYAIPYEYYEKYKIRRYGFHGTSHRYVSKRAAEIMGKPYDQLKIITVHVGNGASVAAVKNGVSVDTSMGFTPLEGLVMGTRSGDIDPAIVEFLEKEEGLSAKEVVNILNKKSGVYGLTKGFSSDMRDIEDNAIEGDPVCRLALDVYEYRIAKYIGAYAAAMNGVDAIVFTAGVGENSPIMREEIIENYLGYLGIKIDKEANDFKGEEKIISTPDSKVIAMVVPTNEELMIAKDTKEIIEKGLDELKI

SEQ ID NO: 549 - DNA, 1251 bp, synthetic construct
  misc_feature 1..1251: note = Variant of acetate kinase
  source 1..1251: mol_type = other DNA
atgcaccatcatcatcatcatggcggtagcggcatgaaagttctggtgattaattctggtagctcctccatcaaatatcagctcctcgatatgaccaacgaaaaggtattagcgaaaggcttggtcgagcgcattggcatcgacggttcgcgtatcgtgcataaagttaacggcgaaaaacacgtgctggaacatgagattaagaatcacgaaattggacttaaattggtcctggatcttcttacggacgaaaaatacggtgtgttgaaggatctcaaagaaatcgatgcagttgggcatcgcgtagtacatggcggcgagcgttttgccagtagcgtgaagattactgacgaagtcttaaagaccatcgagacgttgtcgttcttagctccgttacacaatccagcgaacattatgggtatcaagagcagcatgaaagtgttaccgggtgtgcctcaagttgccgtctttgatacagcgttccaccagaagatgccggagaaagcctatttgtacgcaatcccctatgagtactacgagaaatataaaattcgccgctatgggtttcatggaacctcacatcgttatgtgagtaaacgtgctgcggaaattatgggcaaaccgtacgatcagctcaagatcattaccgttcacgtgggtaacggcgcatcagttgcggcggtgaagaatggcgtatctgttgacacttccatgggtttcacaccacttgaaggtcttgtcatgggcacgcgcagcggcgatattgatccggccatcgtggaatttcttgagaaagaagaaggattgtcggccaaagaagtcgtcaacatcctcaacaagaaatctggtgtgtatgggctcaccaaaggctttagtagtgacatgcgtgacattgaagataatgctattgaaggtgatcctgtatgccgccttgcattagatgtgtacgaatatcgtatcgcgaaatatattggcgcatacgctgcggccatgaacggtgttgacgcgatcgtctttaccgcaggagttggcgaaaatagcccgattatgcgcgaagaaattattgagaactacttgggctacttagggatcaagatcgataaagaagccaatgacttcaaaggtgaggagaagatcatttcaacgcccgattccaaagtgattgcgatggtagttccgacccaggaggagctcatgatcgccaaagacacgaaagaaatcattgagaaagggttggacgagcttaagatc

SEQ ID NO: 550 - protein, 417 aa, synthetic construct
  REGION 1..417: note = Variant of acetate kinase
MHHHHHHGGSGMKVLVINSGSSSIKYQLLDMTNEKVLAKGLVERIGIDGSRIVHKVNGEKHVLEHEIKNHEIGLKLVLDLLTDEKYGVLKDLKEIDAVGHRVVHGGERFASSVKITDEVLKTIETLSFLAPLHNPANIMGIKSSMKVLPGVPQVAVFDTAFHQKMPEKAYLYAIPYEYYEKYKIRRYGFHGTSHRYVSKRAAEIMGKPYDQLKIITVHVGNGASVAAVKNGVSVDTSMGFTPLEGLVMGTRSGDIDPAIVEFLEKEEGLSAKEVVNILNKKSGVYGLTKGFSSDMRDIEDNAIEGDPVCRLALDVYEYRIAKYIGAYAAAMNGVDAIVFTAGVGENSPIMREEIIENYLGYLGIKIDKEANDFKGEEKIISTPDSKVIAMVVPTQEELMIAKDTKEIIEKGLDELKI

SEQ ID NO: 551 - DNA, 1251 bp, synthetic construct
  misc_feature 1..1251: note = Variant of acetate kinase
  source 1..1251: mol_type = other DNA
atgcaccatcatcatcatcatggcggtagcggcatgaaagttctggtgattaattctggtagctcctccatcaaatatcagctcctcgatatgaccaacgaaaaggtattagcgaaaggcttggtcgagcgcattggcatcgacggttcgcgtatcgtgcataaagttaacggcgaaaaacacgtgctggaacatgagattaagaatcacgaaattggacttaaaggggtcctggatcttcttacggacgaaaaatacggtgtgttgaaggatctcaaagaaatcgatgcagttgggcatcgcgtagtacatggcggcgagcgttttgccagtagcgtgaagattactgacgaagtcttaaagaccatcgagacgttgtcgttcttagctccgttacacaatccagcgaacattatgggtatcaagagcagcatgaaagtgttaccgggtgtgcctcaagttgccgtctttgatacagcgttccaccagaagatgccggagaaagcctatttgtacgcaatcccctatgagtactacgagaaatataaaattcgccgctatgggtttcatggaacctcacatcgttatgtgagtaaacgtgctgcggaaattatgggcaaaccgtacgatcagctcaagatcattaccgttcacgtgggtaacggcgcatcagttgcggcggtgaagaatggcgtatctgttgacacttccatgggtttcacaccacttgaaggtcttgtcatgggcacgcgcagcggcgatattgatccggccatcgtggaatttcttgagaaagaagaaggattgtcggccaaagaagtcgtcaacatcctcaacaagaaatctggtgtgtatgggctcaccaaaggctttagtagtgacatgcgtgacattgaagataatgctattgaaggtgatcctgtatgccgccttgcattagatgtgtacgaatatcgtatcgcgaaatatattggcgcatacgctgcggccatgaacggtgttgacgcgatcgtctttaccgcaggagttggcgaaaatagcccgattatgcgcgaagaaattattgagaactacttgggctacttagggatcaagatcgataaagaagccaatgacttcaaaggtgaggagaagatcatttcaacgcccgattccaaagtgattgcgatggtagttccgaccaacgaggagctcatgatcgccaaagacacgaaagaaatcattgagaaagggttggacgagcttaagatc

SEQ ID NO: 552 - protein, 417 aa, synthetic construct
  REGION 1..417: note = Variant of acetate kinase
MHHHHHHGGSGMKVLVINSGSSSIKYQLLDMTNEKVLAKGLVERIGIDGSRIVHKVNGEKHVLEHEIKNHEIGLKGVLDLLTDEKYGVLKDLKEIDAVGHRVVHGGERFASSVKITDEVLKTIETLSFLAPLHNPANIMGIKSSMKVLPGVPQVAVFDTAFHQKMPEKAYLYAIPYEYYEKYKIRRYGFHGTSHRYVSKRAAEIMGKPYDQLKIITVHVGNGASVAAVKNGVSVDTSMGFTPLEGLVMGTRSGDIDPAIVEFLEKEEGLSAKEVVNILNKKSGVYGLTKGFSSDMRDIEDNAIEGDPVCRLALDVYEYRIAKYIGAYAAAMNGVDAIVFTAGVGENSPIMREEIIENYLGYLGIKIDKEANDFKGEEKIISTPDSKVIAMVVPTNEELMIAKDTKEIIEKGLDELKI

SEQ ID NO: 553 - DNA, 1251 bp, synthetic construct
  misc_feature 1..1251: note = Variant of acetate kinase
  source 1..1251: mol_type = other DNA
atgcaccatcatcatcatcatggcggtagcggcatgaaagttctggtgattaattctggtagctcctccatcaaatatcagctcctcgatatgaccaacgaaaaggtattagcgaaaggcttggtcgagcgcattggcatcgacggttcgcgtatcgtgcataaagttaacggcgaaaaacacgtgctggaacatgagattaagaatcacgaaattggacttaaattggtcctggagcttcttacggacgaaaaatacggtgtgttgaaggatctcaaagaaatcgatgcagttgggcatcgcgtagtacatggcggcgagcgttttgccagtagcgtgaagattactgacgaagtcttaaagaccatcgagacgttgtcgttcttagctccgttacacaatccagcgaacattatgggtatcaagagcagcatgaaagtgttaccgggtgtgcctcaagttgccgtctttgatacagcgttccaccagaagatgccggagaaagcctatttgtacgcaatcccctatgagtactacgagaaatataaaattcgccgctatgggtttcatggaacctcacatcgttatgtgagtaaacgtgctgcggaaattatgggcaaaccgtacgatcagctcaagatcattaccgttcacgtgggtaacggcgcatcagttgcggcggtgaagaatggcgtatctgttgacacttccatgggtttcacaccacttgaaggtcttgtcatgggcacgcgcagcggcgatattgatccggccatcgtggaatttcttgagaaagaagaaggattgtcggccaaagaagtcgtcaacatcctcaacaagaaatctggtgtgtatgggctcaccaaaggctttagtagtgacatgcgtgacattgaagataatgctattgaaggtgatcctgtatgccgccttgcattagatgtgtacgaatatcgtatcgcgaaatatattggcgcatacgctgcggccatgaacggtgttgacgcgatcgtctttaccgcaggagttggcgaaaatagcccgattatgcgcgaagaaattattgagaactacttgggctacttagggatcaagatcgataaagaagccaatgacttcaaaggtgaggagaagatcatttcaacgcccgattccaaagtgattgcgatggtagttccgaccaacgaggagctcatgatcgccaaagacacgaaagaaatcattgagaaagggttggacgagcttaagatc

SEQ ID NO: 554 - protein, 417 aa, synthetic construct
  REGION 1..417: note = Variant of acetate kinase
MHHHHHHGGSGMKVLVINSGSSSIKYQLLDMTNEKVLAKGLVERIGIDGSRIVHKVNGEKHVLEHEIKNHEIGLKLVLELLTDEKYGVLKDLKEIDAVGHRVVHGGERFASSVKITDEVLKTIETLSFLAPLHNPANIMGIKSSMKVLPGVPQVAVFDTAFHQKMPEKAYLYAIPYEYYEKYKIRRYGFHGTSHRYVSKRAAEIMGKPYDQLKIITVHVGNGASVAAVKNGVSVDTSMGFTPLEGLVMGTRSGDIDPAIVEFLEKEEGLSAKEVVNILNKKSGVYGLTKGFSSDMRDIEDNAIEGDPVCRLALDVYEYRIAKYIGAYAAAMNGVDAIVFTAGVGENSPIMREEIIENYLGYLGIKIDKEANDFKGEEKIISTPDSKVIAMVVPTNEELMIAKDTKEIIEKGLDELKI

SEQ ID NO: 555 - DNA, 1251 bp, synthetic construct
  misc_feature 1..1251: note = Variant of acetate kinase
  source 1..1251: mol_type = other DNA
atgcaccatcatcatcatcatggcggtagcggcatgaaagttctggtgattaattctggtagctcctccatcaaatatcagctcctcgatatgaccaacgaaaaggtattagcgaaaggcttggtcgagcgcattggcatcgacggttcgcgtatcgtgcataaagttaacggcgaaaaacacgtgctggaacatgagattaagaatcacgaaattggacttaaattggtcctggatattcttacggacgaaaaatacggtgtgttgaaggatctcaaagaaatcgatgcagttgggcatcgcgtagtacatggcggcgagcgttttgccagtagcgtgaagattactgacgaagtcttaaagaccatcgagacgttgtcgttcttagctccgttacacaatccagcgaacattatgggtatcaagagcagcatgaaagtgttaccgggtgtgcctcaagttgccgtctttgatacagcgttccaccagaagatgccggagaaagcctatttgtacgcaatcccctatgagtactacgagaaatataaaattcgccgctatgggtttcatggaacctcacatcgttatgtgagtaaacgtgctgcggaaattatgggcaaaccgtacgatcagctcaagatcattaccgttcacgtgggtaacggcgcatcagttgcggcggtgaagaatggcgtatctgttgacacttccatgggtttcacaccacttgaaggtcttgtcatgggcacgcgcagcggcgatattgatccggccatcgtggaatttcttgagaaagaagaaggattgtcggccaaagaagtcgtcaacatcctcaacaagaaatctggtgtgtatgggctcaccaaaggctttagtagtgacatgcgtgacattgaagataatgctattgaaggtgatcctgtatgccgccttgcattagatgtgtacgaatatcgtatcgcgaaatatattggcgcatacgctgcggccatgaacggtgttgacgcgatcgtctttaccgcaggagttggcgaaaatagcccgattatgcgcgaagaaattattgagaactacttgggctacttagggatcaagatcgataaagaagccaatgacttcaaaggtgaggagaagatcatttcaacgcccgattccaaagtgattgcgatggtagttccgaccaacgaggagctcatgatcgccaaagacacgaaagaaatcattgagaaagggttggacgagcttaagatc

SEQ ID NO: 556 - protein, 417 aa, synthetic construct
  REGION 1..417: note = Variant of acetate kinase
MHHHHHHGGSGMKVLVINSGSSSIKYQLLDMTNEKVLAKGLVERIGIDGSRIVHKVNGEKHVLEHEIKNHEIGLKLVLDILTDEKYGVLKDLKEIDAVGHRVVHGGERFASSVKITDEVLKTIETLSFLAPLHNPANIMGIKSSMKVLPGVPQVAVFDTAFHQKMPEKAYLYAIPYEYYEKYKIRRYGFHGTSHRYVSKRAAEIMGKPYDQLKIITVHVGNGASVAAVKNGVSVDTSMGFTPLEGLVMGTRSGDIDPAIVEFLEKEEGLSAKEVVNILNKKSGVYGLTKGFSSDMRDIEDNAIEGDPVCRLALDVYEYRIAKYIGAYAAAMNGVDAIVFTAGVGENSPIMREEIIENYLGYLGIKIDKEANDFKGEEKIISTPDSKVIAMVVPTNEELMIAKDTKEIIEKGLDELKI

SEQ ID NO: 557 - DNA, 1251 bp, synthetic construct
  misc_feature 1..1251: note = Variant of acetate kinase
  source 1..1251: mol_type = other DNA
atgcaccatcatcatcatcatggcggtagcggcatgaaagttctggtgattaattctggtagctcctccatcaaatatcagctcctcgatatgaccaacgaaaaggtattagcgaaaggcttggtcgagcgcattggcatcgacggttcgcgtatcgtgcataaagttaacggcgaaaaacacgtgctggaacatgagattaagaatcacgaaattggacttaaatcggtcctggatcttcttacggacgaaaaatacggtgtgttgaaggatctcaaagaaatcgatgcagttgggcatcgcgtagtacatggcggcgagcgttttgccagtagcgtgaagattactgacgaagtcttaaagaccatcgagacgttgtcgttcttagctccgttacacaatccagcgaacattatgggtatcaagagcagcatgaaagtgttaccgggtgtgcctcaagttgccgtctttgatacagcgttccaccagaagatgccggagaaagcctatttgtacgcaatcccctatgagtactacgagaaatataaaattcgccgctatgggtttcatggaacctcacatcgttatgtgagtaaacgtgctgcggaaattatgggcaaaccgtacgatcagctcaagatcattaccgttcacgtgggtaacggcgcatcagttgcggcggtgaagaatggcgtatctgttgacacttccatgggtttcacaccacttgaaggtcttgtcatgggcacgcgcagcggcgatattgatccggccatcgtggaatttcttgagaaagaagaaggattgtcggccaaagaagtcgtcaacatcctcaacaagaaatctggtgtgtatgggctcaccaaaggctttagtagtgacatgcgtgacattgaagataatgctattgaaggtgatcctgtatgccgccttgcattagatgtgtacgaatatcgtatcgcgaaatatattggcgcatacgctgcggccatgaacggtgttgacgcgatcgtctttaccgcaggagttggcgaaaatagcccgattatgcgcgaagaaattattgagaactacttgggctacttagggatcaagatcgataaagaagccaatgacttcaaaggtgaggagaagatcatttcaacgcccgattccaaagtgattgcgatggtagttccgaccaacgaggagctcatgatcgccaaagacacgaaagaaatcattgagaaagggttggacgagcttaagatc

SEQ ID NO: 558 - protein, 417 aa, synthetic construct
  REGION 1..417: note = Variant of acetate kinase
MHHHHHHGGSGMKVLVINSGSSSIKYQLLDMTNEKVLAKGLVERIGIDGSRIVHKVNGEKHVLEHEIKNHEIGLKSVLDLLTDEKYGVLKDLKEIDAVGHRVVHGGERFASSVKITDEVLKTIETLSFLAPLHNPANIMGIKSSMKVLPGVPQVAVFDTAFHQKMPEKAYLYAIPYEYYEKYKIRRYGFHGTSHRYVSKRAAEIMGKPYDQLKIITVHVGNGASVAAVKNGVSVDTSMGFTPLEGLVMGTRSGDIDPAIVEFLEKEEGLSAKEVVNILNKKSGVYGLTKGFSSDMRDIEDNAIEGDPVCRLALDVYEYRIAKYIGAYAAAMNGVDAIVFTAGVGENSPIMREEIIENYLGYLGIKIDKEANDFKGEEKIISTPDSKVIAMVVPTNEELMIAKDTKEIIEKGLDELKI

SEQ ID NO: 559 - DNA, 1251 bp, synthetic construct
  misc_feature 1..1251: note = Variant of acetate kinase
  source 1..1251: mol_type = other DNA
atgcaccatcatcatcatcatggcggtagcggcatgaaagttctggtgattaattctggtagctcctccatcaaatatcagctcctcgatatgaccaacgaaaaggtattagcgaaaggcttggtcgagcgcattggcatcgacggttcgcgtatcgtgcataaagttaacggcgaaaaacacgtgctggaacatgagattaagaatcacgaaattggacttaaattggtcctgaagcttcttacggacgaaaaatacggtgtgttgaaggatctcaaagaaatcgatgcagttgggcatcgcgtagtacatggcggcgagcgttttgccagtagcgtgaagattactgacgaagtcttaaagaccatcgagacgttgtcgttcttagctccgttacacaatccagcgaacattatgggtatcaagagcagcatgaaagtgttaccgggtgtgcctcaagttgccgtctttgatacagcgttccaccagaagatgccggagaaagcctatttgtacgcaatcccctatgagtactacgagaaatataaaattcgccgctatgggtttcatggaacctcacatcgttatgtgagtaaacgtgctgcggaaattatgggcaaaccgtacgatcagctcaagatcattaccgttcacgtgggtaacggcgcatcagttgcggcggtgaagaatggcgtatctgttgacacttccatgggtttcacaccacttgaaggtcttgtcatgggcacgcgcagcggcgatattgatccggccatcgtggaatttcttgagaaagaagaaggattgtcggccaaagaagtcgtcaacatcctcaacaagaaatctggtgtgtatgggctcaccaaaggctttagtagtgacatgcgtgacattgaagataatgctattgaaggtgatcctgtatgccgccttgcattagatgtgtacgaatatcgtatcgcgaaatatattggcgcatacgctgcggccatgaacggtgttgacgcgatcgtctttaccgcaggagttggcgaaaatagcccgattatgcgcgaagaaattattgagaactacttgggctacttagggatcaagatcgataaagaagccaatgacttcaaaggtgaggagaagatcatttcaacgcccgattccaaagtgattgcgatggtagttccgaccaacgaggagctcatgatcgccaaagacacgaaagaaatcattgagaaagggttggacgagcttaagatc

SEQ ID NO: 560 - protein, 417 aa, synthetic construct
  REGION 1..417: note = Variant of acetate kinase
MHHHHHHGGSGMKVLVINSGSSSIKYQLLDMTNEKVLAKGLVERIGIDGSRIVHKVNGEKHVLEHEIKNHEIGLKLVLKLLTDEKYGVLKDLKEIDAVGHRVVHGGERFASSVKITDEVLKTIETLSFLAPLHNPANIMGIKSSMKVLPGVPQVAVFDTAFHQKMPEKAYLYAIPYEYYEKYKIRRYGFHGTSHRYVSKRAAEIMGKPYDQLKIITVHVGNGASVAAVKNGVSVDTSMGFTPLEGLVMGTRSGDIDPAIVEFLEKEEGLSAKEVVNILNKKSGVYGLTKGFSSDMRDIEDNAIEGDPVCRLALDVYEYRIAKYIGAYAAAMNGVDAIVFTAGVGENSPIMREEIIENYLGYLGIKIDKEANDFKGEEKIISTPDSKVIAMVVPTNEELMIAKDTKEIIEKGLDELKI

SEQ ID NO: 561 - DNA, 1251 bp, synthetic construct
  misc_feature 1..1251: note = Variant of acetate kinase
  source 1..1251: mol_type = other DNA
atgcaccatcatcatcatcatggcggtagcggcatgaaagttctggtgattaattctggtagctcctccatcaaatatcagctcctcgatatgaccaacgaaaaggtattagcgaaaggcttggtcgagcgcattggcatcgacggttcgcgtatcgtgcataaagttaacggcgaaaaacacgtgctggaacatgagattaagaatcacgaaattggacttaaattggtcctggatcttcttacggacgaaaaatacggtgtgttgaaggatctcaaagaaatcgatgcagttgggcatcgcgtagtacatggcggcgagcgttttgccagtagcgtgaagattactgacgaagtcttaaagaccatcgagacgttgtcgttcttagctccgttacacaatccagcgaacattatgggtatcaagagcagcatgaaagtgttaccgggtgtgcctcaagttgccgtctttgatacagcgttccaccagaagatgccggagaaagcctatttgtacgcaatcccctatgagtactacgagaaatataaaattcgccgctatgggtttcatggatgttcacatcgttatgtgagtaaacgtgctgcggaaattatgggcaaaccgtacgatcagctcaagatcattaccgttcacgtgggtaacggcgcatcagttgcggcggtgaagaatggcgtatctgttgacacttccatgggtttcacaccacttgaaggtcttgtcatgggcacgcgcagcggcgatattgatccggccatcgtggaatttcttgagaaagaagaaggattgtcggccaaagaagtcgtcaacatcctcaacaagaaatctggtgtgtatgggctcaccaaaggctttagtagtgacatgcgtgacattgaagataatgctattgaaggtgatcctgtatgccgccttgcattagatgtgtacgaatatcgtatcgcgaaatatattggcgcatacgctgcggccatgaacggtgttgacgcgatcgtctttaccgcaggagttggcgaaaatagcccgattatgcgcgaagaaattattgagaactacttgggctacttagggatcaagatcgataaagaagccaatgacttcaaaggtgaggagaagatcatttcaacgcccgattccaaagtgattgcgatggtagttccgaccaacgaggagctcatgatcgccaaagacacgaaagaaatcattgagaaagggttggacgagcttaagatc

SEQ ID NO: 562 - protein, 417 aa, synthetic construct
  REGION 1..417: note = Variant of acetate kinase
MHHHHHHGGSGMKVLVINSGSSSIKYQLLDMTNEKVLAKGLVERIGIDGSRIVHKVNGEKHVLEHEIKNHEIGLKLVLDLLTDEKYGVLKDLKEIDAVGHRVVHGGERFASSVKITDEVLKTIETLSFLAPLHNPANIMGIKSSMKVLPGVPQVAVFDTAFHQKMPEKAYLYAIPYEYYEKYKIRRYGFHGCSHRYVSKRAAEIMGKPYDQLKIITVHVGNGASVAAVKNGVSVDTSMGFTPLEGLVMGTRSGDIDPAIVEFLEKEEGLSAKEVVNILNKKSGVYGLTKGFSSDMRDIEDNAIEGDPVCRLALDVYEYRIAKYIGAYAAAMNGVDAIVFTAGVGENSPIMREEIIENYLGYLGIKIDKEANDFKGEEKIISTPDSKVIAMVVPTNEELMIAKDTKEIIEKGLDELKI

SEQ ID NO: 563 - DNA, 1251 bp, synthetic construct
  misc_feature 1..1251: note = Variant of acetate kinase
  source 1..1251: mol_type = other DNA
atgcaccatcatcatcatcatggcggtagcggcatgaaagttctggtgattaattctggtagctcctccatcaaatatcagctcctcgatatgaccaacgaaaaggtattagcgaaaggcttggtcgagcgcattggcatcgacggttcgcgtatcgtgcataaagttaacggcgaaaaatcggtgctggaacatgagattaagaatcacgaaattggacttaaattggtcctggatcttcttacggacgaaaaatacggtgtgttgaaggatctcaaagaaatcgatgcagttgggcatcgcgtagtacatggcggcgagcgttttgccagtagcgtgaagattactgacgaagtcttaaagaccatcgagacgttgtcgttcttagctccgttacacaatccagcgaacattatgggtatcaagagcagcatgaaagtgttaccgggtgtgcctcaagttgccgtctttgatacagcgttccaccagaagatgccggagaaagcctatttgtacgcaatcccctatgagtactacgagaaatataaaattcgccgctatgggtttcatggaacctcacatcgttatgtgagtaaacgtgctgcggaaattatgggcaaaccgtacgatcagctcaagatcattaccgttcacgtgggtaacggcgcatcagttgcggcggtgaagaatggcgtatctgttgacacttccatgggtttcacaccacttgaaggtcttgtcatgggcacgcgcagcggcgatattgatccggccatcgtggaatttcttgagaaagaagaaggattgtcggccaaagaagtcgtcaacatcctcaacaagaaatctggtgtgtatgggctcaccaaaggctttagtagtgacatgcgtgacattgaagataatgctattgaaggtgatcctgtatgccgccttgcattagatgtgtacgaatatcgtatcgcgaaatatattggcgcatacgctgcggccatgaacggtgttgacgcgatcgtctttaccgcaggagttggcgaaaatagcccgattatgcgcgaagaaattattgagaactacttgggctacttagggatcaagatcgataaagaagccaatgacttcaaaggtgaggagaagatcatttcaacgcccgattccaaagtgattgcgatggtagttccgaccaacgaggagctcatgatcgccaaagacacgaaagaaatcattgagaaagggttggacgagcttaagatc

SEQ ID NO: 564 - protein, 417 aa, synthetic construct
  REGION 1..417: note = Variant of acetate kinase
MHHHHHHGGSGMKVLVINSGSSSIKYQLLDMTNEKVLAKGLVERIGIDGSRIVHKVNGEKSVLEHEIKNHEIGLKLVLDLLTDEKYGVLKDLKEIDAVGHRVVHGGERFASSVKITDEVLKTIETLSFLAPLHNPANIMGIKSSMKVLPGVPQVAVFDTAFHQKMPEKAYLYAIPYEYYEKYKIRRYGFHGTSHRYVSKRAAEIMGKPYDQLKIITVHVGNGASVAAVKNGVSVDTSMGFTPLEGLVMGTRSGDIDPAIVEFLEKEEGLSAKEVVNILNKKSGVYGLTKGFSSDMRDIEDNAIEGDPVCRLALDVYEYRIAKYIGAYAAAMNGVDAIVFTAGVGENSPIMREEIIENYLGYLGIKIDKEANDFKGEEKIISTPDSKVIAMVVPTNEELMIAKDTKEIIEKGLDELKI

SEQ ID NO: 565 - DNA, 1251 bp, synthetic construct
  misc_feature 1..1251: note = Variant of acetate kinase
  source 1..1251: mol_type = other DNA
atgcaccatcatcatcatcatggcggtagcggcatgaaagttctggtgattaattctggtagctcctccatcaaatatcagctcctcgatatgaccaacgaaaaggtattagcgaaaggcttggtcgagcgcattggcatcgacggttcgcgtatcgtgcataaagttaacggcgaaaaacacgtgctggcgcatgagattaagaatcacgaaattggacttaaattggtcctggatcttcttacggacgaaaaatacggtgtgttgaaggatctcaaagaaatcgatgcagttgggcatcgcgtagtacatggcggcgagcgttttgccagtagcgtgaagattactgacgaagtcttaaagaccatcgagacgttgtcgttcttagctccgttacacaatccagcgaacattatgggtatcaagagcagcatgaaagtgttaccgggtgtgcctcaagttgccgtctttgatacagcgttccaccagaagatgccggagaaagcctatttgtacgcaatcccctatgagtactacgagaaatataaaattcgccgctatgggtttcatggaacctcacatcgttatgtgagtaaacgtgctgcggaaattatgggcaaaccgtacgatcagctcaagatcattaccgttcacgtgggtaacggcgcatcagttgcggcggtgaagaatggcgtatctgttgacacttccatgggtttcacaccacttgaaggtcttgtcatgggcacgcgcagcggcgatattgatccggccatcgtggaatttcttgagaaagaagaaggattgtcggccaaagaagtcgtcaacatcctcaacaagaaatctggtgtgtatgggctcaccaaaggctttagtagtgacatgcgtgacattgaagataatgctattgaaggtgatcctgtatgccgccttgcattagatgtgtacgaatatcgtatcgcgaaatatattggcgcatacgctgcggccatgaacggtgttgacgcgatcgtctttaccgcaggagttggcgaaaatagcccgattatgcgcgaagaaattattgagaactacttgggctacttagggatcaagatcgataaagaagccaatgacttcaaaggtgaggagaagatcatttcaacgcccgattccaaagtgattgcgatggtagttccgaccaacgaggagctcatgatcgccaaagacacgaaagaaatcattgagaaagggttggacgagcttaagatc

SEQ ID NO: 566 - protein, 417 aa, synthetic construct
  REGION 1..417: note = Variant of acetate kinase
MHHHHHHGGSGMKVLVINSGSSSIKYQLLDMTNEKVLAKGLVERIGIDGSRIVHKVNGEKHVLAHEIKNHEIGLKLVLDLLTDEKYGVLKDLKEIDAVGHRVVHGGERFASSVKITDEVLKTIETLSFLAPLHNPANIMGIKSSMKVLPGVPQVAVFDTAFHQKMPEKAYLYAIPYEYYEKYKIRRYGFHGTSHRYVSKRAAEIMGKPYDQLKIITVHVGNGASVAAVKNGVSVDTSMGFTPLEGLVMGTRSGDIDPAIVEFLEKEEGLSAKEVVNILNKKSGVYGLTKGFSSDMRDIEDNAIEGDPVCRLALDVYEYRIAKYIGAYAAAMNGVDAIVFTAGVGENSPIMREEIIENYLGYLGIKIDKEANDFKGEEKIISTPDSKVIAMVVPTNEELMIAKDTKEIIEKGLDELKI

SEQ ID NO: 567 - DNA, 969 bp, synthetic construct
  misc_feature 1..969: note = Variant of adenosine kinase
  source 1..969: mol_type = other DNA
atgcaccatcatcaccatcacgggggctccggcatgagtgcactgatttgcggttctttagcgtatgataccatcatggtgtttccggaccagttcaagaaccatattctgcccgataaagttcacatcctcaatgtcagctttcttgtaccacgcatgcgtcgtgaatttggaggctgtgccggcaacattgcgtacaatctgcatctgttgggtggtgctccgatccctatgggaacggtgggccaagatttcggtccgtatcgcgagcacttcgaaactctgggcattgacttatcccgcgtcaagatcatcgatgatctgtttacaccgcaggccttcattaccaccgaccatgataacaaccagattacggcgtttcatccaggcgcaatgatgcgttcgtacgaaaatcacgttcgtgatgtgccgggtgttaccttgggcctcgtaggtcctgatggacgcgagggcatgatccaaaatgccgaagaatttgctgctggtggcattccgttcatttttgacccaggtcaggcaatgccgctgttcaacggccccgaactgcgcgagtttatcgaacaggcggactatgtggtggtcaacgattacgaaagcaatcttcttcaagaacgtactggctggaacgagcaggacattgtttcacgcgtgcaggcgtatatcaccacgcaaggtcctaaaggagccctggtacatacaccggagaagacctacgatattccgccggcacacgaacgtcgtgtcgttgatccaactggttgcggcgacgcgtttcgcgccggcctgatctatggtattcagcataattatgattggttgaccattggccgcatgggaaacttaatgggtgcgctgaaagtggaacaccctggcacgcaaaatcagcgtttcgattttgccgaattcaacgaccagttcaaacaacagtttggctacgcgctctaatga

SEQ ID NO: 568 - protein, 321 aa, synthetic construct
  REGION 1..321: note = Variant of adenosine kinase
MHHHHHHGGSGMSALICGSLAYDTIMVFPDQFKNHILPDKVHILNVSFLVPRMRREFGGCAGNIAYNLHLLGGAPIPMGTVGQDFGPYREHFETLGIDLSRVKIIDDLFTPQAFITTDHDNNQITAFHPGAMMRSYENHVRDVPGVTLGLVGPDGREGMIQNAEEFAAGGIPFIFDPGQAMPLFNGPELREFIEQADYVVVNDYESNLLQERTGWNEQDIVSRVQAYITTQGPKGALVHTPEKTYDIPPAHERRVVDPTGCGDAFRAGLIYGIQHNYDWLTIGRMGNLMGALKVEHPGTQNQRFDFAEFNDQFKQQFGYAL

SEQ ID NO: 569 - DNA, 969 bp, synthetic construct
  misc_feature 1..969: note = Variant of adenosine kinase
  source 1..969: mol_type = other DNA
atgcaccatcatcaccatcacgggggctccggcatgagtgcactgatttgcggttctttagcgtatgataccatcatggtgtttccggaccagttcaagaatcatattctgcccgataaagttcacatcctcaatgtcagctttcttgtaccacgcatgcgtcgtgaatttggaggctgtgccggcaacattgcgtacaatctgcatctgttgggtggtgctccgatccctatgggaacggtgggccaagatttcggtccgtatcgcgagcacttcgaaactctgggcattgacttatcccgcgtcaagatcatcgatgatctgtttacagcgcaggccttcattacgaccgaccatgatcataaccagattacggcgtttcatccaggggcaatgatgcgttcgtacgaaaatcacgttcgtgatgtgccgggtgttaccttgggcctcgtaggtcctgatggacgcgagggcatgatccaaaatgccgaagaatttgctgctggtggcattccgttcatttttgacccaggtcaggcactgccgctgttcaacggccccgaactgcgcgagtttatcgaacaggcggactatgtggtggtcaacgattacgaaagcaatctgcttcaaacgcgtactggctggaacgagcaggacattgtttcacgcgtgcaggcgtatatcaccacgcaaggttcgaaaggagccctggtacatacaccggagaagacctacgatattcgtccggcacacgaacgtcgtgtcgttgatccaactggttgcggcgacgcgtttcgcgccggcctgatctatggtattcagcataattatgattggttgaccattggccgcatgggaaacttaatgggtgcgctgaaagtggaacaccctggcacgcaaaatcagcgtttcgattttgccctgttcaacgaccagttcaaacaaagctttggctacgcgctctaatga

SEQ ID NO: 570 - protein, 321 aa, synthetic construct
  REGION 1..321: note = Variant of adenosine kinase
MHHHHHHGGSGMSALICGSLAYDTIMVFPDQFKNHILPDKVHILNVSFLVPRMRREFGGCAGNIAYNLHLLGGAPIPMGTVGQDFGPYREHFETLGIDLSRVKIIDDLFTAQAFITTDHDHNQITAFHPGAMMRSYENHVRDVPGVTLGLVGPDGREGMIQNAEEFAAGGIPFIFDPGQALPLFNGPELREFIEQADYVVVNDYESNLLQTRTGWNEQDIVSRVQAYITTQGSKGALVHTPEKTYDIRPAHERRVVDPTGCGDAFRAGLIYGIQHNYDWLTIGRMGNLMGALKVEHPGTQNQRFDFALFNDQFKQSFGYAL

SEQ ID NO: 571 - DNA, 969 bp, synthetic construct
  misc_feature 1..969: note = Variant of adenosine kinase
  source 1..969: mol_type = other DNA
atgcaccatcatcaccatcacgggggctccggcatgagtgcactgatttgcggttctttagcgtatgataccatcatggtgtttccggaccagttcaagaatcatattctgcccgataaagttcacatcctcaatgtcagctttcttgtaccacgcctgcgccgtgaatttggaggctgtgccggcaacattgcgtacaatctgcatctgttgggtggtgctccgatccctatgggaacggtgggccaagatttcggtccgtatcgcgagcacttcgaaactctgggcattgacttatcccgcgtcaagatcatcgatgatctgtttacagcgcaggccttcattacgaccgaccatgatcataaccagattacggcgtttcatccaggggcaatgatgcgttcgtacgaaaatcacgttcgtgatgtgccgggtgttaccttgggcctcgtaggtcctgatggccgcgagggtatgatccaaaatgccgaagaatttgctgctggtggcattccgttcatttttgacccaggtcaggcactgccgctgttcaacggccccgaactgcgcgagtttatcgaacaggcggactatgtggtggtcaacgattacgaaagcaatctgcttcaaacgcgtactggctggaacgagcaggacattgtttcacgcgtgcaggcgtatatcaccacgcaaggttcgaaaggagccctggtacatacaccggagaagacctacgatattcgtccggcacacgaacgtcgtgtcgttgatccaactggttgcggcgacgcgtttcgcgccggcctgatctatggtattcagcataattatgattggttgaccattggccgcatgggaaacttaatgggtgcgctgaaagtggaacaccctggcacgcaaaatcagcgtttcgattttgccctgttcaacgaccagttcaaacaaagctttggctacgcgctctaatga

SEQ ID NO: 572 - protein, 321 aa, synthetic construct
  REGION 1..321: note = Variant of adenosine kinase
MHHHHHHGGSGMSALICGSLAYDTIMVFPDQFKNHILPDKVHILNVSFLVPRLRREFGGCAGNIAYNLHLLGGAPIPMGTVGQDFGPYREHFETLGIDLSRVKIIDDLFTAQAFITTDHDHNQITAFHPGAMMRSYENHVRDVPGVTLGLVGPDGREGMIQNAEEFAAGGIPFIFDPGQALPLFNGPELREFIEQADYVVVNDYESNLLQTRTGWNEQDIVSRVQAYITTQGSKGALVHTPEKTYDIRPAHERRVVDPTGCGDAFRAGLIYGIQHNYDWLTIGRMGNLMGALKVEHPGTQNQRFDFALFNDQFKQSFGYAL

SEQ ID NO: 573 - DNA, 969 bp, synthetic construct
  misc_feature 1..969: note = Variant of adenosine kinase
  source 1..969: mol_type = other DNA
atgcaccatcatcaccatcacgggggctccggcatgagtgcactgatttgcggttctttagcgtatgataccatcatggtgtttccggaccagttcaagaatcatattctgcccgataaagttcacatcctcaatgtcagctttcttgtaccacgcctgcgccgtgaatttggaggctgtgccggcaacattgcgtacaatctgcatctgttgggtggtgctccgatccctatgggaacggtgggccaagatttcggtccgtatcgcgagcacttcgaaactctgggcattgacttatcccgcgtcaagatcatcgatgatctgtttacagcgcaggccttcattacgaccgaccatgatcataaccagattacggcgtttcatccaggggcaatgatgcgttcgtacgaaaatcacgttcgtgatgtgccgggtgttaccttgggcctcgtaggtcctgatggccgcgagggtatgatccaaaatgccgaagaatttgctgctggtggcattccgttcatttttgacccaggtcaggcactgccgctgttcaacggccccgaactgcgcgagtttatcgaacaggcggactatgtggtggtcaacgattacgaaagcaatctgcttcaaacgcgtactggctggaacgagcaggacattgtttcacgcgtgcaggcgtatatcaccacgcaaggttcgaaaggagccctggtacatacaccggagaagacctacgatattcgtccggcacacgaacgtcgtgtcgttgatccaactggttgcggcgacgcgtttcgcgccggcctgatctatggtattcagcataattatgattggttgaccattggccgcatgggaaacttaatgggtgcgctgaaagtggaacaccctggcacgcaaaatcagcgtttcgattttgccctgttcaacgaccagttcaaacaaagctttggctactcgctctaatga

SEQ ID NO: 574 - protein, 321 aa, synthetic construct
  REGION 1..321: note = Variant of adenosine kinase
MHHHHHHGGSGMSALICGSLAYDTIMVFPDQFKNHILPDKVHILNVSFLVPRLRREFGGCAGNIAYNLHLLGGAPIPMGTVGQDFGPYREHFETLGIDLSRVKIIDDLFTAQAFITTDHDHNQITAFHPGAMMRSYENHVRDVPGVTLGLVGPDGREGMIQNAEEFAAGGIPFIFDPGQALPLFNGPELREFIEQADYVVVNDYESNLLQTRTGWNEQDIVSRVQAYITTQGSKGALVHTPEKTYDIRPAHERRVVDPTGCGDAFRAGLIYGIQHNYDWLTIGRMGNLMGALKVEHPGTQNQRFDFALFNDQFKQSFGYSL

SEQ ID NO: 575 - DNA, 969 bp, synthetic construct
  misc_feature 1..969: note = Variant of adenosine kinase
  source 1..969: mol_type = other DNA
atgcaccatcatcaccatcacgggggctccggcatgagtgcactgatttgcggttctttagcgtatgataccatcatggtgtttccggaccagttcaagaaccatattctgcccgatcgtgttcaccgcctcaatgtcagctttcttgtaccacgcatgcgtcgtgaatttggaggctgtgccggcaacattgcgtacaatctgcatctgttgggtggtgctccgatccctatgggaacggtgggccaagatttcggtccgtatcgcgagcacttcgaaactctgggcattgacttatcccgcgtcaagatcatcgatgatctgagtacaccgcaggccttcattaccaccgaccatgatcataaccagattacggcgtttcatccaggcgcaatgatgcgttcgtacgaaaatcacgttcgtgatgtgccgggtgttaccttgggcctcgtaggtcctgatggacgcgagggcatgatccaaaatgccgaagaatttgctgctggtggcattccgttcatttttgacccaggtcaggcactgccgctgttcaacggccccgaactgcgcgagtttatcgaacaggcggactatgtggtggtcaacgattacgaaagcaatcttcttcaagaacgtactggctggaacgagcaggacattgtttcacgcgtgcaggcgtatatcaccacgcaaggttcgaaaggagccctggtacatacaccggagaagacctacgatattccgccggcacacgaacgtcgtgtcgttgatccaactggttgcggcgacgcgtttcgcgccggcctgatctatggtattcagcataattatgattggttgaccattggccgcatgggaaacttaatgggtgcgctgaaagtggaacaccctggcacgcaaaatcagcgtttcgattttgccgaattcaacgaccagttcaaacaagattttggctacgcgctctaatga

SEQ ID NO: 576 - protein, 321 aa, synthetic construct
  REGION 1..321: note = Variant of adenosine kinase
MHHHHHHGGSGMSALICGSLAYDTIMVFPDQFKNHILPDRVHRLNVSFLVPRMRREFGGCAGNIAYNLHLLGGAPIPMGTVGQDFGPYREHFETLGIDLSRVKIIDDLSTPQAFITTDHDHNQITAFHPGAMMRSYENHVRDVPGVTLGLVGPDGREGMIQNAEEFAAGGIPFIFDPGQALPLFNGPELREFIEQADYVVVNDYESNLLQERTGWNEQDIVSRVQAYITTQGSKGALVHTPEKTYDIPPAHERRVVDPTGCGDAFRAGLIYGIQHNYDWLTIGRMGNLMGALKVEHPGTQNQRFDFAEFNDQFKQDFGYAL

SEQ ID NO: 577 - DNA, 969 bp, synthetic construct
  misc_feature 1..969: note = Variant of adenosine kinase
  source 1..969: mol_type = other DNA
atgcaccatcatcaccatcacgggggctccggcatgagtgcactgatttgcggttctttagcgtatgataccatcatggtgtttccggaccagttcaagaaccatattctgcccgatcgtgttcaccgcctcaatgtcagctttcttgtaccacgcatgcgtcgtgaatttggaggctgtgccggcaacattgcgtacaatctgcatctgttgggtggtgctccgatcgtaatggctacggtgggccaagatttcggtccgtatcgcgagcacttcgaaactctgggcattgacttatcccgcgtcaagatcatcgatgatctgagtacaccgcaggccttcattaccaccgacatggatcataaccagattacggcgtttcacggcggcgcaatgatgcgttcgtacgaaaatcacgttcgtgatgtgccgggtgttaccttgggcctcgtaggtcctgatggacgcgagggcatgatccaaaatgccgaagaatttgctgctggtggcattccgttcatttttgacccaggtcaggcagtgccgctgttcaacggccccgaactgcgcgagtttatcgaacaggcggactatgtggtggtcaacgattacgaaagcaatcttcttcaagcccgtactggctggaacgagcaggacattgtttcacgcgtgcaggcgtatatcaccacgcaaggttcggctggagccctggtacatacaccggagaagacctacgatattccgccggctaaaacccgtcgtgtcgttgatccaactggttgcggcgacgcgtttcgcgccggcctgatctatggtattcagcataattatgattggttgaccattggccgcatgggaaacttaatgggtgcgctgaaagtggaacaccctggcacccaaaatcagcgtttcgattttgccgaattcaacgaccagttcaaacaatattttggctacgcgctctaatga

SEQ ID NO: 578 - protein, 321 aa, synthetic construct
  REGION 1..321: note = Variant of adenosine kinase
MHHHHHHGGSGMSALICGSLAYDTIMVFPDQFKNHILPDRVHRLNVSFLVPRMRREFGGCAGNIAYNLHLLGGAPIVMATVGQDFGPYREHFETLGIDLSRVKIIDDLSTPQAFITTDMDHNQITAFHGGAMMRSYENHVRDVPGVTLGLVGPDGREGMIQNAEEFAAGGIPFIFDPGQAVPLFNGPELREFIEQADYVVVNDYESNLLQARTGWNEQDIVSRVQAYITTQGSAGALVHTPEKTYDIPPAKTRRVVDPTGCGDAFRAGLIYGIQHNYDWLTIGRMGNLMGALKVEHPGTQNQRFDFAEFNDQFKQYFGYAL

SEQ ID NO: 579 - DNA, 699 bp, synthetic construct
  misc_feature 1..699: note = Variant of adenylate kinase
  source 1..699: mol_type = other DNA
atgcaccatcatcaccatcacgggggctccggcatgatggcatatctggtgttcttaggtccgccgggcgcgggaaaaggtacccaatcgaaacgcattcaggaaaagactggcatcccacatattagcacgggcgatatcttccgtgacatcgtcaagaaagagaacgatgaactgggcaagaagattaaagaaatcatggagaaaggtgaactcgttccagatgaactggtgaatgaggtagtaaaacgccgcctgtcggagaaagactgcgaaaaaggctttattttggatggttatccgcgtaccgttgctcaagcggaattcctggacagttttcttgaatcccagaacaaacagttgacagccgccgtgctgttcaaagtccccgaagatgttgttgtgcaacgtttaacctctcgcctgatctgtccgaaatgcgggcgtatctacaatatgatttcactgccaccaaaagaagacgagctgtgtgacgattgcaaagtcaaattagtacagcgtgatgatgataaggaagaaacggttcgtcaccgcctgaaagtctaccttgagaagacccagccggtcattgactattatggcaagaaaggtattctcaaacgcgtagatgggtcgcaaggaatcgacaacgttgttgcagaagtcctgaagattattggttggagcgataagtaatga

SEQ ID NO: 580 - protein, 231 aa, synthetic construct
  REGION 1..231: note = Variant of adenylate kinase
MHHHHHHGGSGMMAYLVFLGPPGAGKGTQSKRIQEKTGIPHISTGDIFRDIVKKENDELGKKIKEIMEKGELVPDELVNEVVKRRLSEKDCEKGFILDGYPRTVAQAEFLDSFLESQNKQLTAAVLFKVPEDVVVQRLTSRLICPKCGRIYNMISLPPKEDELCDDCKVKLVQRDDDKEETVRHRLKVYLEKTQPVIDYYGKKGILKRVDGSQGIDNVVAEVLKIIGWSDK

SEQ ID NO: 581 - DNA, 699 bp, synthetic construct
  misc_feature 1..699: note = Variant of adenylate kinase
  source 1..699: mol_type = other DNA
atgcaccatcatcaccatcacgggggctccggcatgatggcatatctggtgttcttaggtccgccgggcgcgggaaaaggtacccaatcgaaacgcattcaggaaaagactggcatcccacatattagcacgggcgatatcttccgtgacatcgtcaagaaagagaacgatgaactgggcaagaagattaaagaaatcatggagaaaggtgaactcgttccagatgaactgggtaatgcggtagtaaaacgccgcctgtcggagaaagactgcgaaaaaggctttattttggatggttatccgcgtaccgttgctcaagcggaattcctggatagttttcttgaatcccagaacaaacagttgacagccgccgtgctgttcaaagtccccgaagatgttgttgtgcaacgtttaacctctcgcctgatctgtccgaaatgcgggcgtatctacaacatgatttttctgccaccaaaagaagacgagctgtgtgacgattgcaaagtcaaattagtacagcgtgatgatgataaggaagaaacggttcgtcaccgcctgaaagtctaccttgagaagacccagccggtcattgactattatggcaagaaaggtattctcaaacgcgtagatgggtcgcaaggaatcgacaacgttgttgcagaagtcctggggattctgggttggagcgataagtaatga

SEQ ID NO: 582 - protein, 231 aa, synthetic construct
  REGION 1..231: note = Variant of adenylate kinase
MHHHHHHGGSGMMAYLVFLGPPGAGKGTQSKRIQEKTGIPHISTGDIFRDIVKKENDELGKKIKEIMEKGELVPDELGNAVVKRRLSEKDCEKGFILDGYPRTVAQAEFLDSFLESQNKQLTAAVLFKVPEDVVVQRLTSRLICPKCGRIYNMIFLPPKEDELCDDCKVKLVQRDDDKEETVRHRLKVYLEKTQPVIDYYGKKGILKRVDGSQGIDNVVAEVLGILGWSDK

SEQ ID NO: 583 - DNA, 699 bp, synthetic construct
  misc_feature 1..699: note = Variant of adenylate kinase
  source 1..699: mol_type = other DNA
atgcaccatcatcaccatcacgggggctccggcatgatggcatatctggtgttcttaggtccgccgggcgcgggaaaaggtacccaatcgaaacgcattcaggaaaagactggcatcccgcatattagcacgggcgatatcttccgtgacatcgtcaagaaagagaacgatgaactggccaagaaaattaaagaaatcatggagaaaggtgaactcgttccagatgaactgggtaatgcggtagtaaaacgccgcctgtcggagaaagactgcgaaaaaggctttattttggatggttatccgcgtaccgtggctcaagcggaattcctggatagttttcttgaatcccagaacaaacagttgacagccgccgtgctgttcaaagtccccgaagatgttgttgtgcaacgtttaacctctcgcctgatctgtccgaaatgcgggcgtatctacaacatgatttttctgccaccaaaagaagacgagctgtgtgacgattgcaaagtcggcttagtacagcgtgatgatgataaggaagaaacggttcgtcaccgcctgaaagtctaccttgagaagacccagccggtcattgactattatggcaagaaaggtattctcaaacgcgtagatgggtcgcaaggaatcgacaacgttgttgcagaagtcctggggattctgggttggagcgataagtaatga

SEQ ID NO: 584 - protein, 231 aa, synthetic construct
  REGION 1..231: note = Variant of adenylate kinase
MHHHHHHGGSGMMAYLVFLGPPGAGKGTQSKRIQEKTGIPHISTGDIFRDIVKKENDELAKKIKEIMEKGELVPDELGNAVVKRRLSEKDCEKGFILDGYPRTVAQAEFLDSFLESQNKQLTAAVLFKVPEDVVVQRLTSRLICPKCGRIYNMIFLPPKEDELCDDCKVGLVQRDDDKEETVRHRLKVYLEKTQPVIDYYGKKGILKRVDGSQGIDNVVAEVLGILGWSDK

SEQ ID NO: 585 - DNA, 699 bp, synthetic construct
  misc_feature 1..699: note = Variant of adenylate kinase
  source 1..699: mol_type = other DNA
atgcaccatcatcaccatcacgggggctccggcatgggggcatatctggtgttcttaggtccgccgggcgcgggaaaaggtacccaaggccgtcgcatttcggcaaagactggcatcccgcatattagcacgggcgatatcttccgtgacatcgtcgctaagcaaaacgatgaactggcctcgaaaattaaagagatcatggagaaaggtgaactcgttccagatgaactgggtaatgcggtagtaaaacgccgcctgtcggagaaagactgcgaaaaaggctttattttggatggttatccgcgtaccgtgcgccaagcggaatatctggatagttttcttgaaagccagaatcgccagttgacagccgccgtgctgttcaaagtccccgaagatgaagttgtgcaacgtttaacctctcgcctgatctgtccgaaatgcgggcgtatctacaacatgatttttctgccaccaaaagaagacgagctgtgtgacgattgcggtgtcggcttagtacagcgtgatgatgataaggaagaaacggtccgtcaccgcctgaaagtctaccttgagaagacccagccggtcattgactattatagtaagaaaggtattctcaaacgcgtagatgggtcgcaaggaatcgacaacgttgttgcagaagtcctggggattctgggttggagcgataagtaatga

SEQ ID NO: 586 - protein, 231 aa, synthetic construct
  REGION 1..231: note = Variant of adenylate kinase
MHHHHHHGGSGMGAYLVFLGPPGAGKGTQGRRISAKTGIPHISTGDIFRDIVAKQNDELASKIKEIMEKGELVPDELGNAVVKRRLSEKDCEKGFILDGYPRTVRQAEYLDSFLESQNRQLTAAVLFKVPEDEVVQRLTSRLICPKCGRIYNMIFLPPKEDELCDDCGVGLVQRDDDKEETVRHRLKVYLEKTQPVIDYYSKKGILKRVDGSQGIDNVVAEVLGILGWSDK

SEQ ID NO: 587 - DNA, 699 bp, synthetic construct
  misc_feature 1..699: note = Variant of adenylate kinase
  source 1..699: mol_type = other DNA
atgcaccatcatcaccatcacgggggctccggcatgggggcatatctggtgttcttaggtccgccgggcgcgggaaaaggtacccaaggccgtattatttcggcaaagactggcatcccgcatattagcacgggcgatatcctgcgtgacatcgtcgctaagcaaaacgatgaagttgcctcgaaaattaaagagatcatggagaaaggtgaactcgttccagatgaactgggtaatgcggtagtaaaacgccgcctgtcggagaaagactgcgaaaaaggctttattttggatggtttcccgcgtaccgtgcgccaagcggaatatctggatagttttcttgaaagccagaatcgccagttgacagccgccgtgctgattaaagtccccgaagatgaagttgttcagcgtctgctgtctcgcctgatctgtccgaaatgcgggcgtatctacaacatgatttttctgccaccaaaagaagacgagctgtgtgacgattgcggtgtcggcttagtacagcgtttagatgataaggaagaaacggtccgtcaccgcctgaaagtctaccttgagaagacccagccggtcattgactattatagtaagaaaggtattctcaaacgcgtagatgggtcgcaaggaatcgacaacgttgtggcagaagtcctggggattctgggttggagcgataagtaatga

SEQ ID NO: 588 - protein, 231 aa, synthetic construct
  REGION 1..231: note = Variant of adenylate kinase
MHHHHHHGGSGMGAYLVFLGPPGAGKGTQGRIISAKTGIPHISTGDILRDIVAKQNDEVASKIKEIMEKGELVPDELGNAVVKRRLSEKDCEKGFILDGFPRTVRQAEYLDSFLESQNRQLTAAVLIKVPEDEVVQRLLSRLICPKCGRIYNMIFLPPKEDELCDDCGVGLVQRLDDKEETVRHRLKVYLEKTQPVIDYYSKKGILKRVDGSQGIDNVVAEVLGILGWSDK

SEQ ID NO: 589 - DNA, 1587 bp, synthetic construct
  misc_feature 1..1587: note = Variant of terminal deoxynucleotidyltransferase
  source 1..1587: mol_type = other DNA
atgcaccatcatcatcatcatggcggtagcggcagccacggcattcgtaccatcgattcggacttcgggaagaaacagcagaaaaaaggcgataaccacgatagttccgccacttatgaaatcaaatttcacgagtttgtgctgttcattctcgaagaaaaaatgggtgcgacgcgtcgtacttttctgacagatttagcccgcaagaaagggttccgcgtcgagaatgaactgaccgacgaagttacccacatcgtggcagaaaatctgtcacgctctgaagtattggcttggctgaaagaacacaagatggagaagaccaagcaattcgaactgctggatattagctggcttatcgaaagcatgaaagttggtaaaccggtggacaccaaggggaaataccagttggcggaatcggttgaggtgagtgcgaacccagatccgacagaaggtcgtgtaaacgagctgcctcctactatgaaaaccgtttctccgtatgcgtgtcaacgccgcaccaccctgaacaaccgtaatcaacgttttacggactcgctggaaattcttcgtgaaaattacgagttcaaacgcaacgatgatactgcgctggaatttcgtcgtgctatctccgtgctgaaaagccttccgtttgaggtacgtagcctgaaagacacggaaggattgccctggatcggtgatgaagtcaaagggattatggaagaaatcatcgaggtcggggagtcgcgtgaagtgcaggccgtgctcaatgatgagtggtatcaaagcttccaccgctttaagagtgtctttggagtgggggtgaagacagcagacaagtggtaccgtatgggtctgcgcaccctcgaggatgttcgttccagcaagaccctgaagttgaccccgatgcagaaagtaggtctgctgtattatgaagatcttgctcgcggcgttacgcgtgccgaagctgacgcgatttggctgctggttcaggatgcagtcgcaactttcgacccggatgcgatcgtggagattgtcggtggatttcgtcgtgggaaacctcagggtcacgacgttgatctgcttatcagttctccgggagctgagaaagagcaagaagaccaactcctgcagaaagtgatgaatctgtggaagaaacaagggttgttgctgtacggtcgtctggaatggacccagtgggaagatgggggttcgccttccggtaaggctgacgagggtgacgcgggtgcgaaatgctttctgatcctcaaactttatgatcatctggtgcgtaaaagcaaatggaacatgccgacgggttcgaacgtgggcgagtccaaaccgtggaaagcaattcgcgtagatctgctgcgttgcccctatggcagttttgcgtttgcgatgttgcagtggaccggaagccgcatgttccgtcgtgatctgcgttggtacgccactgacgagaagaacatgatgctggacaatcattcgctgtatgacctgaccaagggtatcttcctccctgctaaatcggaagaggaaattttcgcacatctggggcttgaatacctggaaccgttcgaacgtaacgca

SEQ ID NO: 590 - protein, 529 aa, synthetic construct
  REGION 1..529: note = Variant of terminal deoxynucleotidyltransferase
MHHHHHHGGSGSHGIRTIDSDFGKKQQKKGDNHDSSATYEIKFHEFVLFILEEKMGATRRTFLTDLARKKGFRVENELTDEVTHIVAENLSRSEVLAWLKEHKMEKTKQFELLDISWLIESMKVGKPVDTKGKYQLAESVEVSANPDPTEGRVNELPPTMKTVSPYACQRRTTLNNRNQRFTDSLEILRENYEFKRNDDTALEFRRAISVLKSLPFEVRSLKDTEGLPWIGDEVKGIMEEIIEVGESREVQAVLNDEWYQSFHRFKSVFGVGVKTADKWYRMGLRTLEDVRSSKTLKLTPMQKVGLLYYEDLARGVTRAEADAIWLLVQDAVATFDPDAIVEIVGGFRRGKPQGHDVDLLISSPGAEKEQEDQLLQKVMNLWKKQGLLLYGRLEWTQWEDGGSPSGKADEGDAGAKCFLILKLYDHLVRKSKWNMPTGSNVGESKPWKAIRVDLLRCPYGSFAFAMLQWTGSRMFRRDLRWYATDEKNMMLDNHSLYDLTKGIFLPAKSEEEIFAHLGLEYLEPFERNA

SEQ ID NO: 591 - DNA, 18 bp, synthetic construct
  misc_feature 1..18: note = Modified oligo substrate or product
  modified_base 17^18: mod_base = OTHER; note = phosphorothioate linkage
  modified_base 18: mod_base = OTHER; note = 2'-methoxyguanosine
  source 1..18: mol_type = other DNA
tttttttttttttttatn

SEQ ID NO: 592 - DNA, 18 bp, synthetic construct
  misc_feature 1..18: note = Modified oligo substrate or product
  modified_base 1: mod_base = OTHER; note = 2'-deoxythymidine with 6-carboxyfluorescein modification
  modified_base 17^18: mod_base = OTHER; note = phosphorothioate linkage
  modified_base 18: mod_base = OTHER; note = 2'-methoxyguanosine
  source 1..18: mol_type = other DNA
nttttttttttttttatn

SEQ ID NO: 593 - DNA, 18 bp, synthetic construct
  misc_feature 1..18: note = Modified oligo substrate or product
  modified_base 16: mod_base = OTHER; note = 2'-methoxyguanosine
  modified_base 17: mod_base = OTHER; note = 2'-methoxyadenosine
  modified_base 18: mod_base = OTHER; note = 2'-methoxycytidine
  source 1..18: mol_type = other DNA
tttttttttttttttnnn

SEQ ID NO: 594 - DNA, 18 bp, synthetic construct
  misc_feature 1..18: note = Modified oligo substrate or product
  modified_base 1: mod_base = OTHER; note = 2'-deoxythymidine with 6-carboxyfluorescein modification
  modified_base 16: mod_base = OTHER; note = 2'-methoxyguanosine
  modified_base 17: mod_base = OTHER; note = 2'-methoxyadenosine
  modified_base 18: mod_base = OTHER; note = 2'-methoxycytidine
  source 1..18: mol_type = other DNA
nttttttttttttttnnn

SEQ ID NO: 595 - DNA, 19 bp, synthetic construct
  misc_feature 1..19: note = Modified oligo substrate or product
  modified_base 17^18: mod_base = OTHER; note = phosphorothioate linkage
  modified_base 18: mod_base = OTHER; note = 2'-methoxyguanosine
  modified_base 19: mod_base = OTHER; note = guanosine ribonucleotide
  source 1..19: mol_type = other DNA
tttttttttttttttatnn

SEQ ID NO: 596 - DNA, 19 bp, synthetic construct
  misc_feature 1..19: note = Modified oligo substrate or product
  modified_base 1: mod_base = OTHER; note = 2'-deoxythymidine with 6-carboxyfluorescein modification
  modified_base 17^18: mod_base = OTHER; note = phosphorothioate linkage
  modified_base 18: mod_base = OTHER; note = 2'-methoxyguanosine
  modified_base 19: mod_base = OTHER; note = guanosine ribonucleotide
  source 1..19: mol_type = other DNA
nttttttttttttttatnn

SEQ ID NO: 597 - DNA, 19 bp, synthetic construct
  misc_feature 1..19: note = Modified oligo substrate or product
  modified_base 16: mod_base = OTHER; note = 2'-methoxyguanosine
  modified_base 17: mod_base = OTHER; note = 2'-methoxyadenosine
  modified_base 18: mod_base = OTHER; note = 2'-methoxycytidine
  modified_base 19: mod_base = OTHER; note = guanosine ribonucleotide
  source 1..19: mol_type = other DNA
tttttttttttttttnnnn

SEQ ID NO: 598 - DNA, 19 bp, synthetic construct
  misc_feature 1..19: note = Modified oligo substrate or product
  modified_base 1: mod_base = OTHER; note = 2'-deoxythymidine with 6-carboxyfluorescein modification
  modified_base 16: mod_base = OTHER; note = 2'-methoxyguanosine
  modified_base 17: mod_base = OTHER; note = 2'-methoxyadenosine
  modified_base 18: mod_base = OTHER; note = 2'-methoxycytidine
  modified_base 19: mod_base = OTHER; note = guanosine ribonucleotide
  source 1..19: mol_type = other DNA
nttttttttttttttnnnn

SEQ ID NO: 599 - DNA, 963 bp, synthetic construct
  misc_feature 1..963: note = variant of adenosine kinase from Xanthemonas campestris
  source 1..963: mol_type = other DNA
atgcaccatcatcaccatcacgggggctccggcatgagtgcactgatttgcggttctttagcgtatgataccatcatggtgtttccggaccagttcaagaaccatattctgcccgatcgtgttcaccgcctcaatgtcagctttcttgtaccggacatgcgtcgtgaatttggaggctgtgccggcaacattgcgtacaatctgcatctgttgggtggtgctccgatcgtaatggctacggtgggccaagatttcggtccgtatcgcgagcacttcgaaactctgggcattgacttatcccgcgtcaagatcatcgatgatctgagtacaccgcaggccttcattaccaccgacatggatcataaccagattacggcgtttcacggcggcgcaatgatgcgttcgtacgaaaatcacgttcgtgatgtgccgggtgttaccttgggcctcgtaggtcctgatggacgcgagggcatgatccaaaatgccgaagaatttgctgctatgggcattccgttcatttttgacccaggtcaggcagtgccgctgttcaacggccccgaactgcgcgagtttatcgaacaggcggactatgtggtggtcaacgattacgaaagcaatcttcttcaagcccgtactggctggaacgagcaggacattgtttcacgcgtgcaggcgtatatcaccacgcaaggttcggctggagccctggtacatacaccggagaagacctacgatattccgccggctaaaacccgtcgtgtcgttgatccaactggttgcggcgacgcgtttcgcgccggcctgatctatggtattcagcataattatgattggttgaccattggccgcatgggaaacttaatgggtgcgctgaaagtggaacaccctggcacccaaaatcagcgtttcgattttgccgaattcaacgaccagttcaaacaatattttggctacgcgctc

SEQ ID NO: 600 - protein, 321 aa, synthetic construct
  REGION 1..321: note = variant of adenosine kinase from Xanthemonas campestris
MHHHHHHGGSGMSALICGSLAYDTIMVFPDQFKNHILPDRVHRLNVSFLVPDMRREFGGCAGNIAYNLHLLGGAPIVMATVGQDFGPYREHFETLGIDLSRVKIIDDLSTPQAFITTDMDHNQITAFHGGAMMRSYENHVRDVPGVTLGLVGPDGREGMIQNAEEFAAMGIPFIFDPGQAVPLFNGPELREFIEQADYVVVNDYESNLLQARTGWNEQDIVSRVQAYITTQGSAGALVHTPEKTYDIPPAKTRRVVDPTGCGDAFRAGLIYGIQHNYDWLTIGRMGNLMGALKVEHPGTQNQRFDFAEFNDQFKQYFGYAL

SEQ ID NO: 601 - DNA, 963 bp, synthetic construct
  misc_feature 1..963: note = variant of adenosine kinase from Xanthemonas campestris
  source 1..963: mol_type = other DNA
atgcatcatcaccatcaccatggggggtccggtatgagtgcactcatttgcggttctttagcgtatgataacatcatggtgtttccggactatttcaagaaccatattctgcccgatcgtgttcaccgcctcaatgtcagctttctggtatttgacatgcgtcgtgaatttggaggctgtgccggcaacattgcgtacaatctgcatctgttgggtggtcgcccgatcgtaatggctacggtgggccaagatttcggtccgtatcgcgaacacttcgaaactctgggcattgacttatcccgcgtcaagatcatcgatgatctgagtacaccgcaggggttcattaccaccgacatggatcaaaaccagattacggcgtttcacagcggcgcaatgatgcgttcgtacgaaaatcacgttcgtgatgtgccgggtgttaccttgggcctcgtaggtcctgatggacgcgagggcatgatccaaaatgccgaagaatttgctgctatgggcattccgttcatttttgacccaggtcaggcagtgcctctgttcagcggcccggaactgcgcgaatttatcgaacaggcggactatgtggtggtcaacgattacgaaagccgccttcttcaagcccgtactggctggaacgagcaggacattgttagccgcgtgcaggcgtatatcaccacgcaaggttcggctggagccgtggtaatgacaccggagaagcgctacgttattccggctgctaaaactcgtcgtgtcgttgatccaactggttgcggcgacgcgtttcgcgccggcctgatctatggtattcagcatgaatatgattggttgaccattggccgcatgggaaacttaatgggtgcgctgaaagtggaacaccctggcacccaaaatcagcgtttcgattttgccgaattcaacgaccagttcaaacaatattttggctacgcgctc

SEQ ID NO: 602 - protein, 321 aa, synthetic construct
  REGION 1..321: note = variant of adenosine kinase from Xanthemonas campestris
MHHHHHHGGSGMSALICGSLAYDNIMVFPDYFKNHILPDRVHRLNVSFLVFDMRREFGGCAGNIAYNLHLLGGRPIVMATVGQDFGPYREHFETLGIDLSRVKIIDDLSTPQGFITTDMDQNQITAFHSGAMMRSYENHVRDVPGVTLGLVGPDGREGMIQNAEEFAAMGIPFIFDPGQAVPLFSGPELREFIEQADYVVVNDYESRLLQARTGWNEQDIVSRVQAYITTQGSAGAVVMTPEKRYVIPAAKTRRVVDPTGCGDAFRAGLIYGIQHEYDWLTIGRMGNLMGALKVEHPGTQNQRFDFAEFNDQFKQYFGYAL

SEQ ID NO: 603 - DNA, 963 bp, synthetic construct
  misc_feature 1..963: note = variant of adenosine kinase from Xanthemonas campestris
  source 1..963: mol_type = other DNA
atgcatcatcaccatcaccatggggggtccggtatgagtgcactcatttgcggttctttagcgtatgataacatcatgtggtttccggactatttcaagaaccatattctgcccgatcgtgttcaccgcctcaatgtcagctttctggtatttgacatgcgtcgtgaatttggaggctgtgccggcaacattgcgtacaatctgcatctgttgggtggtcgcccgatcgtaatggctacggtgggccaagatttcggtccgtatcgcgaacacttcgaaactctgggcattgacttatcccgcgtcaagatcatcgatgatctgagtacaccgcaggggttcattaccaccgacatggatcaaaaccagattacggcgtttcacagcggcgcaatgatgcgttcgtacgaaaatcacgttcgtgatgtgccgggtgttaccttgggcctcgtaggtcctgatggacgcgagggcatgatccaaaatgccgaagaatttgctgctatgggcattccgttcatttttgacccaggtcaggcagtgcctctgttcagcggcccggaactgcgcgaatttatcgaacaggcggactatgtggtggtcaacgattacgaaagccgccttcttcaagcccgtactggctggaacgagcaggacattgttagccgcgtgcaggcgtatatcaccacgcaaggttcggctggagccgtggtaatgacaccggagaagcgctacgttattccggctgctaaaactcgtcgtgtcgttgatccaactggttgcggcgacgcgtttcgcgccggcctgatctatggtattcagcatgaatatgattggttgaccattggccgcatgggaaacttaatgggtgcgctgaaagtggaacaccctggcacccaaaatcagcgtttcacctttgccgaattcaacgaccggttcaaacaatattttggctacgcgctc

SEQ ID NO: 604 - protein, 321 aa, synthetic construct
  REGION 1..321: note = variant of adenosine kinase from Xanthemonas campestris
MHHHHHHGGSGMSALICGSLAYDNIMWFPDYFKNHILPDRVHRLNVSFLVFDMRREFGGCAGNIAYNLHLLGGRPIVMATVGQDFGPYREHFETLGIDLSRVKIIDDLSTPQGFITTDMDQNQITAFHSGAMMRSYENHVRDVPGVTLGLVGPDGREGMIQNAEEFAAMGIPFIFDPGQAVPLFSGPELREFIEQADYVVVNDYESRLLQARTGWNEQDIVSRVQAYITTQGSAGAVVMTPEKRYVIPAAKTRRVVDPTGCGDAFRAGLIYGIQHEYDWLTIGRMGNLMGALKVEHPGTQNQRFTFAEFNDRFKQYFGYAL

SEQ ID NO: 605 - DNA, 693 bp, synthetic construct
  misc_feature 1..693: note = variant of adenylate kinase from Thermotoga neapolitana
  source 1..693: mol_type = other DNA
atgcaccatcatcaccatcacgggggctccggcatgggggcatatctggtgttcttaggtccgccgggcgcgggaaaaggtacccaaggccgtattatttcggcaaagactggcatcccgcatattagcacgggcgatatcctgcgtgacatcgtcgctaagcaaaacgatgaagttgcctcgagcattaaagagatcatggagaaaggtgaactcgttccagatgaactgggtaatgcggtagtaaaacgccgcctgtcggagaaagactgcgaaaaaggctttattttggatggtttcccgcgtaccgtgcgccaagcggaatatctggatagttttcttgaaagccagaatcgccagttgacagccgccgtgctgattgaggtccccgaagatgaagttgttcagcgtctgctgtctcgcctgatctgtccgaaatgcgggcgtatctacaacatgatttttctgccaccaaaagaagacgagctgtgtgacgattgcggtgtcggcttagtacagcgtttagatgataaggaagaaacggtccgtcaccgcctgaaagtctaccgtgagaagacccagccggtcattgactattatagtaagaaaggtattctcaaacgcgtagatgggtcgcaaggaatcgacaacgttgtggcagaagtcctggggattctgggttggagcgataag

SEQ ID NO: 606 - protein, 231 aa, synthetic construct
  REGION 1..231: note = variant of adenylate kinase from Thermotoga neapolitana
MHHHHHHGGSGMGAYLVFLGPPGAGKGTQGRIISAKTGIPHISTGDILRDIVAKQNDEVASSIKEIMEKGELVPDELGNAVVKRRLSEKDCEKGFILDGFPRTVRQAEYLDSFLESQNRQLTAAVLIEVPEDEVVQRLLSRLICPKCGRIYNMIFLPPKEDELCDDCGVGLVQRLDDKEETVRHRLKVYREKTQPVIDYYSKKGILKRVDGSQGIDNVVAEVLGILGWSDK

SEQ ID NO: 607 - DNA, 693 bp, synthetic construct
  misc_feature 1..693: note = variant of adenylate kinase from Thermotoga neapolitana
  source 1..693: mol_type = other DNA
atgcaccatcatcaccatcacgggggctccggcatgggggcatatctggtgttattaggtccgccgggcgcgggaaaaggtacccaaggccgtattatttcggcaaagactggcatcccgcatattagcacgggcgatatcctgcgtgacatcgtcgctaagcaaaacgatgaagttgcctcgagcattaaagagtggatgctgaaaggtgaactcgttccagatgaactgggtaatgcggtagtaaaacgccgcctgaaggagaaagactgcgaaaaaggctttattttggatggtttcccgcgtaccgtgcgccaagcggaatatctggatagttttcttgaaagccagggccgccagttgacagccgccgtgctgattgaggtccccgaagatgaagttgttgcacgtctgctgtctcgccgtatctgtccgaaatgcgggcgtagttacaacatgatttttctgccaccaaaagaagacgagctgtgtgacgattgcggtgtcagcttagtacagcgtttagatgataaggaagaaacggtccgtcaccgcctgaaagtctaccgtgagaagacccagccggtcattgactattatagtaagaaaggtattctcgcacgcgtagatgggtcgcaaggaatcccacctatcgtggcagaagtcctggggattctgggttggagcgataag

SEQ ID NO: 608 - protein, 231 aa, synthetic construct
  REGION 1..231: note = variant of adenylate kinase from Thermotoga neapolitana
MHHHHHHGGSGMGAYLVLLGPPGAGKGTQGRIISAKTGIPHISTGDILRDIVAKQNDEVASSIKEWMLKGELVPDELGNAVVKRRLKEKDCEKGFILDGFPRTVRQAEYLDSFLESQGRQLTAAVLIEVPEDEVVARLLSRRICPKCGRSYNMIFLPPKEDELCDDCGVSLVQRLDDKEETVRHRLKVYREKTQPVIDYYSKKGILARVDGSQGIPPIVAEVLGILGWSDK

SEQ ID NO: 609 - DNA, 693 bp, synthetic construct
  misc_feature 1..693: note = variant of adenylate kinase from Thermotoga neapolitana
  source 1..693: mol_type = other DNA
atgcaccatcatcaccatcacgggggctccggcatgggggcatatctggtgttattaggtccgccgggcgcgggaaaaggtacccaaggccgtattatttcggcaaagactggcatcccgcatattagcacgggcgatatcctgcgtgacatcgtcgctaagcaaaacgatgaagttgcctcgagcattaaagagtggatgctgaaaggtgaactcgttccagatgaaattggtaatgcggtagtaaaacgccgcctgaaggagaaagactgcgaaaaaggctttattttggatggtttcccgcgtaccgtgcgccaagcggaatatctggatagttttcttgaaagccagggccgccagttgacagccgccgtgctgattgaggtccccgaagatgaagttgttgcacgtctgctgtctcgccgtgtttgtccgaaatgcgggcgtagttacaacatgatttttctgccaccaaaagaagacgagctgtgtgacgattgcggtgtcagcttagtacagcgtttagatgataaggaagaaacggtccgtcaccgcctgaaagtctaccgtgagaagacccagccggtcattgactattatagtaagaaaggtattctcgcacgcgtagatgggagccaagaaatccggcctatcgtggcagaagtcctggggattctgggttggagcgataag

SEQ ID NO: 610 - protein, 231 aa, synthetic construct
  REGION 1..231: note = variant of adenylate kinase from Thermotoga neapolitana
MHHHHHHGGSGMGAYLVLLGPPGAGKGTQGRIISAKTGIPHISTGDILRDIVAKQNDEVASSIKEWMLKGELVPDEIGNAVVKRRLKEKDCEKGFILDGFPRTVRQAEYLDSFLESQGRQLTAAVLIEVPEDEVVARLLSRRVCPKCGRSYNMIFLPPKEDELCDDCGVSLVQRLDDKEETVRHRLKVYREKTQPVIDYYSKKGILARVDGSQEIRPIVAEVLGILGWSDK

SEQ ID NO: 611 - DNA, 1251 bp, synthetic construct
  misc_feature 1..1251: note = variant of acetate kinase from Marinitoga sp. 38H-ov
  source 1..1251: mol_type = other DNA
atgcaccatcatcatcatcatggcggtagcggcatgaaagttctggtgattaattctggtagctcctccatcaaatatcagctcctcgatatgaccaacgaaaaggtattagcgaaaggcttggtcgagcgcattggcatcgacggttcgcgtatcgtgcatagtgttaacggcgaaaaacacgtgctggaacatgagattaagaatcacgaaattggacttaaattggtcctggatcttcttacggacgaaaaatacggtgtgttgaaggatctcaaagaaatcgatgcagttgggcatcgcgtagtacatggcggcgagcgttttgccagtagcgtgaagattactgacgaagtcttaaagaccatcgagacgttgtcgttcttagctccgttacacaatccagcgaacattatgggtatcaagagcagcatgaaagtgttaccgggtgtgcctcaagttgccgtctttgatacagcgttccaccagaagatgccggagaaagcctatttgtacgcaatcccctatgagtactacgagaaatataaaattcgccgctatgggtttcatggaacgtcacatcgttatgtgagtaaacgtgctgcggaaattatgggcaaaccgtacgatcagctcaagatcattaccgttcacgtgggtaacggcgcatcagttgcggcggtgaagaatggcgtatctgttgacacttccatgggtttcacaccacttgaaggtcttgtcatgggcacgcgcagcggcgatattgatccggccatcgtggaatttcttgagaaagaagaaggattgtcggccaaagaagtcgtcaacatcctcaacaagaaatctggtgtgtatgggctcaccaaaggctttagtagtgacatgcgtgacattgtggataatgctcgcgaaggtgatcctctgtgccgccttgcattagatgtgtacgaatatcgtatcgcgaaatatattggcgcatacgctgcggccatgaacggtgttgacgcgatcgtctttaccgcaggatttctggaaaatagcccgattatgcgcgaagaaattattgagaactacttgggctacttagggatcaagatcgataaagaagccaatgacttcaaaggtgaggagaagatcatttcaacgcccgattccaaagtgattgcgatggtagttccgaccaacgaggagctcatgatcgccaaagacacgaaagaaatcattgagaaagggttggacgagcttaagatc

SEQ ID NO: 612 - protein, 417 aa, synthetic construct
  REGION 1..417: note = variant of acetate kinase from Marinitoga sp. 38H-ov
MHHHHHHGGSGMKVLVINSGSSSIKYQLLDMTNEKVLAKGLVERIGIDGSRIVHSVNGEKHVLEHEIKNHEIGLKLVLDLLTDEKYGVLKDLKEIDAVGHRVVHGGERFASSVKITDEVLKTIETLSFLAPLHNPANIMGIKSSMKVLPGVPQVAVFDTAFHQKMPEKAYLYAIPYEYYEKYKIRRYGFHGTSHRYVSKRAAEIMGKPYDQLKIITVHVGNGASVAAVKNGVSVDTSMGFTPLEGLVMGTRSGDIDPAIVEFLEKEEGLSAKEVVNILNKKSGVYGLTKGFSSDMRDIVDNAREGDPLCRLALDVYEYRIAKYIGAYAAAMNGVDAIVFTAGFLENSPIMREEIIENYLGYLGIKIDKEANDFKGEEKIISTPDSKVIAMVVPTNEELMIAKDTKEIIEKGLDELKI

SEQ ID NO: 613 - DNA, 1251 bp, synthetic construct
  misc_feature 1..1251: note = variant of acetate kinase from Marinitoga sp. 38H-ov
  source 1..1251: mol_type = other DNA
atgcaccatcatcatcatcatggcggtagcggcatgaaagttctggtgattaattctggtagctcctccatcaaatatcagctcctcgatatgtccaacgaaaaggtattagcgaaaggcttggtcgagcgcattggcatcgacggttcgcgtatcgtgcatagtgttaacggcgaaaaacacgtgctggaacatgagattaagaatcacgaaattggacttaaattggtcctggatcttcttacggacgaaaaatacggtgtgttgaaggatctcaaagaaatcgatgcagttgggcatcgcgtagtacatggcggcgagcgttttgccagtagcgtgaagattactgacgaagtcttaaagaccatcgagacgttgtcgttcttagctccgttacacaatccagcgaacattatgggtatcaagagcagcatgaaagtgttaccgggtgtgcctcaagttgccgtctttgatacagcgttccaccagaagatgccggagaaagcctatttgtacgcaatcccctatgagtactacgagaaatataaaattcgccgctatgggtttcatggaacgtcacatcgttatgtgagtaaacgtgctgcggaaattatgggcaaaccgtacgatcagctcaagatcattaccgttcacgtgggtaacggcgcatcagttgcggcggtgaagaatggcgtatctgttgacacttccatgggtttcacaccacttgaaggtcttgtcatgggcacgcgcagcggcgatattgatccggccatcgtggaatttcttgagaaagaagaaggattgtcggccaaagaagtcgtcaacatcctcaacaagaaatctggtgtgtatgggctcaccaaaggctttagtagtgacatgcgtgacattgtggataatgctattgaaggtgatcctgtgtgccgccttgcattagatgtgtacgaatatcgtatcgcgaaatatattggcgcatacgctgcggccatgaacggtgttgacgcgatcgtctttaccgcaggagttctggaaaatagcccgattatgcgcgaagaaattattgagaactacttgggctacttagggatcaagatcgataaagaagccaatgacttcaaaggtgaggagaagatcatttcaacgcccgattccaaagtgattgcgatggtagttccgaccaacgaggagctcatgatcgccaaagacacgaaagaaatcattgagaaagggttggacgagcttaagatc

SEQ ID NO: 614 - protein, 417 aa, synthetic construct
  REGION 1..417: note = variant of acetate kinase from Marinitoga sp. 38H-ov
MHHHHHHGGSGMKVLVINSGSSSIKYQLLDMSNEKVLAKGLVERIGIDGSRIVHSVNGEKHVLEHEIKNHEIGLKLVLDLLTDEKYGVLKDLKEIDAVGHRVVHGGERFASSVKITDEVLKTIETLSFLAPLHNPANIMGIKSSMKVLPGVPQVAVFDTAFHQKMPEKAYLYAIPYEYYEKYKIRRYGFHGTSHRYVSKRAAEIMGKPYDQLKIITVHVGNGASVAAVKNGVSVDTSMGFTPLEGLVMGTRSGDIDPAIVEFLEKEEGLSAKEVVNILNKKSGVYGLTKGFSSDMRDIVDNAIEGDPVCRLALDVYEYRIAKYIGAYAAAMNGVDAIVFTAGVLENSPIMREEIIENYLGYLGIKIDKEANDFKGEEKIISTPDSKVIAMVVPTNEELMIAKDTKEIIEKGLDELKI

SEQ ID NO: 615 - DNA, 1251 bp, synthetic construct
  misc_feature 1..1251: note = variant of acetate kinase from Marinitoga sp. 38H-ov
  source 1..1251: mol_type = other DNA
atgcaccatcatcatcatcatggcggtagcggcatgaaagttctggtgattaattctggtagctcctccatcaaatatcagctcctcgatatgaccaacgaaaaggtattagcgaaaggcttggtcgagcgcattggcatcgacggttcgcgtatcgtgcatagtgttaacggcgaaaaacacgtgctggaacatgagattaagaatcacgaaattggacttaaattggtcctggatcttcttacggacgaaaaatacggtgtgttgaaggatctcaaagaaatcgatgcagttgggcatcgcgtagtacatggcggcgagcgttttgccagtagcgtgaagattactgacgaagtcttaaagaccatcgagacgttgtcgttcttagctccgttacacaatccagcgaacattatgggtatcaagagcagcatgaaagtgttaccgggtgtgcctcaagttgccgtctttgatacagcgttccaccagaagatgccggagaaagcctatttgtacgcaatcccctatgagtactacgagaaatataaaattcgccgctatgggtttcatggaacgtcacatcgttatgtgagtaaacgtgctgcggaaattatgggcaaaccgtacgatcagctcaagatcattaccgttcacgtgggtaacggcgcatcagttgcggcggtgaagaatggcgtatctgttgacacttccatgggtttcacaccacttgaaggtcttgtcatgggcacgcgcagcggcgatattgatccggccatcgtggaatttcttgagaaagaagaaggattgtcggccaaagaagtcgtcaacatcctcaacaagaaatctggtgtgtatgggctcaccaaaggctttagtagtgacatgcgtgacattgtggataatgctcgcgaaggtgatcctctgtgccgccttgcattagatgtgtacgaatatcgtatcgcgaaatatattggcgcatacgctgcggccatgaacggtgttgacgcgatcgtctttaccgcaggagttctggaaaatagcccgattatgcgcgaagaaattattgagaactacttgggctacttagggatcaagatcgataaagaagccaatgacttcaaaggtgaggagaagatcatttcaacgcccgattccaaagtgattgcgatggtagttccgaccaacgaggagctcatgatcgccaaagacacgaaagaaatcattgagaaagggttggacgagcttaagatc

SEQ ID NO: 616 - protein, 417 aa, synthetic construct
  REGION 1..417: note = variant of acetate kinase from Marinitoga sp. 38H-ov
MHHHHHHGGSGMKVLVINSGSSSIKYQLLDMTNEKVLAKGLVERIGIDGSRIVHSVNGEKHVLEHEIKNHEIGLKLVLDLLTDEKYGVLKDLKEIDAVGHRVVHGGERFASSVKITDEVLKTIETLSFLAPLHNPANIMGIKSSMKVLPGVPQVAVFDTAFHQKMPEKAYLYAIPYEYYEKYKIRRYGFHGTSHRYVSKRAAEIMGKPYDQLKIITVHVGNGASVAAVKNGVSVDTSMGFTPLEGLVMGTRSGDIDPAIVEFLEKEEGLSAKEVVNILNKKSGVYGLTKGFSSDMRDIVDNAREGDPLCRLALDVYEYRIAKYIGAYAAAMNGVDAIVFTAGVLENSPIMREEIIENYLGYLGIKIDKEANDFKGEEKIISTPDSKVIAMVVPTNEELMIAKDTKEIIEKGLDELKI

SEQ ID NO: 617 - DNA, 1251 bp, synthetic construct
  misc_feature 1..1251: note = variant of acetate kinase from Marinitoga sp. 38H-ov
  source 1..1251: mol_type = other DNA
atgcaccatcatcatcatcatggcggtagcggcatgaaagttctggtgattaattctggtagctcctccatcaaatatcagctcctcgatatgaccaacgaaaaggtattagcgaaaggcttggtcgagcgcattggcatcgacggttcgcgtatcgtgcataaggttaacggcgaaaaacacgtgctggaacatgagattaagaatcacgaaattggacttaaattggtcctggatcttcttacggacgaaaaatacggtgtgttgaaggatctcaaagaaatcgatgcagttgggcatcgcgtagtacatggcggcgagcgttttgccagtagcgtgaagattactgacgaagtcttaaagaccatcgagacgttgtcgttcttagctccgttacacaatccagcgaacattatgggtatcaagagcagcatgaaagtgttaccgggtgtgcctcaagttgccgtctttgatacagcgttccaccagaagatgccggagaaagcctatttgtacgcaatcccctatgagtactacgagaaatataaaattcgccgctatgggtttcatggaacgtcacatcgttatgtgagtaaacgtgctgcggaaattatgggcaaaccgtacgatcagctcaagatcattaccgttcacgtgggtaacggcgcatcagttgcggcggtgaagaatggcgtatctgttgacacttccatgggtttcacaccacttgaaggtcttgtcatgggcacgcgcagcggcgatattgatccggccatcgtggaatttcttgagaaagaagaaggattgtcggccaaagaagtcgtcaacatcctcaacaagaaatctggtgtgtatgggctcaccaaaggctttagtagtgacatccgtgacattgtggataatgctcgcgaaggtgatcctctgtgccgccttgcattagatgtgtacgaatatcgtatcgcgaaatatattggcgcatacgctgcggccatgaacggtgttgacgcgatcgtctttaccgcaggagttggcgaaaatagcccgattatgcgcgaagaaattattgagaactacttgggctacttagggatcaagatcgataaagaagccaatgacttcaaaggtgaggagaagatcatttcaacgcccgattccaaagtgattgcgatggtagttccgaccaacgaggagctcatgatcgccaaagacacgaaagaaatcattgagaaagggttggacgagcttaagatc

SEQ ID NO: 618 - protein, 417 aa, synthetic construct
  REGION 1..417: note = variant of acetate kinase from Marinitoga sp. 38H-ov
MHHHHHHGGSGMKVLVINSGSSSIKYQLLDMTNEKVLAKGLVERIGIDGSRIVHKVNGEKHVLEHEIKNHEIGLKLVLDLLTDEKYGVLKDLKEIDAVGHRVVHGGERFASSVKITDEVLKTIETLSFLAPLHNPANIMGIKSSMKVLPGVPQVAVFDTAFHQKMPEKAYLYAIPYEYYEKYKIRRYGFHGTSHRYVSKRAAEIMGKPYDQLKIITVHVGNGASVAAVKNGVSVDTSMGFTPLEGLVMGTRSGDIDPAIVEFLEKEEGLSAKEVVNILNKKSGVYGLTKGFSSDIRDIVDNAREGDPLCRLALDVYEYRIAKYIGAYAAAMNGVDAIVFTAGVGENSPIMREEIIENYLGYLGIKIDKEANDFKGEEKIISTPDSKVIAMVVPTNEELMIAKDTKEIIEKGLDELKI

SEQ ID NO: 619 - DNA, 1251 bp, synthetic construct
  misc_feature 1..1251: note = variant of acetate kinase from Marinitoga sp. 38H-ov
  source 1..1251: mol_type = other DNA
atgcaccatcatcatcatcatggcggtagcggcatgaaagttctggtgattaattctggtagctcctccatcaaatatcagctcctcgatatgaccaacgaaaaggtattagcgaaaggcttggtcgagcgcattggcatcgacggttcgcgtatcgtgcataaagttaacggcgaagggcacgtgctggaacatgagattaaaaatcacgaaattggacttaaattggtcctggatcttcttacggacgaaaaatacggtgtgttgaaggatctcaaagaaatcgatgcagttgggcatcgcgtagtacatggcggcgagcgttttgccagtagcgtgaagattactgacgaagtcttaaagaccatcgagacgttgtcgttcttagctccgttacacaatccagcgaacattatgggtatcaagagcagcatgaaagtgttaccgggtgtgcctcaagttgccgtctttgatacagcgttccaccagaagatgccggagaaagcctatttgtacgcaatcccctatgagtactacgagaaatataaaattcgccgctatgggtttcatggaacctcacatcgttatgtgagtaaacgtgctgcggaaattatgggcaaaccgtacgatcagctcaagatcattaccgttcacgtgggtaacggcgcatcagttgcggcggtgaagaatggcgtatctgttgacacttccatgggtttcacaccacttgaaggtcttgtcatgggcacgcgcagcggcgatattgatccggccatcgtggaatttcttgagaaagaagaaggattgtcggccaaagaagtcgtcaacatcctcaacaagaaatctggtgtgtatgggctcaccaaaggctttagtagtgacatgcgtgacattgtgctgaaggctattgaaggtgatcctgtatgccgccttgcattagatgtgtattattatcgtatcgcgaaatatattggcgcatacgctgcggccatgaacggtgttgacgcgatcgtctttaccgcaggagttggcgaaaatagcccgattatgcgcgaagaaattattgagaactacttgggctacttagggatcaagatcgataaagaagccaatgacttcaaaggtgaggagaagatcatttcaacgcccgattccaaagtgattgcgatggtagttccgaccaacgaggagctcatgatcgccaaagacacgaaagaaatcattgagaaagggttggacgagcttaagatc

SEQ ID NO: 620 - protein, 417 aa, synthetic construct
  REGION 1..417: note = variant of acetate kinase from Marinitoga sp. 38H-ov
MHHHHHHGGSGMKVLVINSGSSSIKYQLLDMTNEKVLAKGLVERIGIDGSRIVHKVNGEGHVLEHEIKNHEIGLKLVLDLLTDEKYGVLKDLKEIDAVGHRVVHGGERFASSVKITDEVLKTIETLSFLAPLHNPANIMGIKSSMKVLPGVPQVAVFDTAFHQKMPEKAYLYAIPYEYYEKYKIRRYGFHGTSHRYVSKRAAEIMGKPYDQLKIITVHVGNGASVAAVKNGVSVDTSMGFTPLEGLVMGTRSGDIDPAIVEFLEKEEGLSAKEVVNILNKKSGVYGLTKGFSSDMRDIVLKAIEGDPVCRLALDVYYYRIAKYIGAYAAAMNGVDAIVFTAGVGENSPIMREEIIENYLGYLGIKIDKEANDFKGEEKIISTPDSKVIAMVVPTNEELMIAKDTKEIIEKGLDELKI

SEQ ID NO: 621 - DNA, 1251 bp, synthetic construct
  misc_feature 1..1251: note = variant of acetate kinase from Marinitoga sp. 38H-ov
  source 1..1251: mol_type = other DNA
atgcaccatcatcatcatcatggcggtagcggcatgaaagttctggtgattaattctggtagctcctccatcaaatatcagctcctcgatatgaccaacgaaaaggtattagcgaaaggcttggtcgagcgcattggcatcgacggttcgcgtatcgtgcataaggttaacggcgaaaaacacgtgctggaacatgagattaagaatcacgaaattggacttaaattggtcctggatcttcttacggacgaaaaatacggtgtgttgaaggatctcaaagaaatcgatgcagttgggcatcgcgtagtacatggcggcgagcgttttgccagtagcgtgaagattactgacgaagtcttaaagaccatcgagacgttgtcgttcttagctccgttacacaatccagcgaacattatgggtatcaagagcagcatgaaagtgttaccgggtgtgcctcaagttgccgtctttgatacagcgttccaccagaagatgccggagaaagcctatttgtacgcaatcccctatgagtactacgagaaatataaaattcgccgctatgggtttcatggaacgtcacatcgttatgtgagtaaacgtgctgcggaaattatgggcaaaccgtacgatcagctcaagatcattaccgttcacgtgggtaacggcgcatcagttgcggcggtgaagaatggcgtatctgttgacacttccatgggtttcacaccacttgaaggtcttgtcatgggcacgcgcagcggcgatattgatccggccatcgtggaatttcttgagaaagaagaaggattgtcggccaaagaagtcgtcaacatcctcaacaagaaatctggtgtgtatgggctcaccaaaggctttagtagtgacatgcgtgacattgtggataatgctattgaaggtgatcctgtatgccgccttgcattagatgtgtacgaatatcgtatcgcgaaatatattggcgcatacgctgcggccatgaacggtgttgacgcgatcgtctttaccgcaggagttctggaaaatagcccgattatgcgcgaagaaattattgagaactacttgggctacttagggatcaagatcgataaagaagccaatgacttcaaaggtgaggagaagatcatttcaacgcccgattccaaagtgattgcgatggtagttccgaccaacgaggagctcatgatcgccaaagacacgaaagaaatcattgagaaagggttggacgagcttaagatc

SEQ ID NO: 622 - protein, 417 aa, synthetic construct
  REGION 1..417: note = variant of acetate kinase from Marinitoga sp. 38H-ov
MHHHHHHGGSGMKVLVINSGSSSIKYQLLDMTNEKVLAKGLVERIGIDGSRIVHKVNGEKHVLEHEIKNHEIGLKLVLDLLTDEKYGVLKDLKEIDAVGHRVVHGGERFASSVKITDEVLKTIETLSFLAPLHNPANIMGIKSSMKVLPGVPQVAVFDTAFHQKMPEKAYLYAIPYEYYEKYKIRRYGFHGTSHRYVSKRAAEIMGKPYDQLKIITVHVGNGASVAAVKNGVSVDTSMGFTPLEGLVMGTRSGDIDPAIVEFLEKEEGLSAKEVVNILNKKSGVYGLTKGFSSDMRDIVDNAIEGDPVCRLALDVYEYRIAKYIGAYAAAMNGVDAIVFTAGVLENSPIMREEIIENYLGYLGIKIDKEANDFKGEEKIISTPDSKVIAMVVPTNEELMIAKDTKEIIEKGLDELKI

SEQ ID NO: 623 - DNA, 1251 bp, synthetic construct
  misc_feature 1..1251: note = variant of acetate kinase from Marinitoga sp. 38H-ov
  source 1..1251: mol_type = other DNA
atgcaccatcatcatcatcatggcggtagcggcatgaaagttctggtgattaattctggtagctcctccatcaaatatcagctcctcgatatgaccaacgaaaaggtattagcgaaaggcttggtcgagcgcattggcatcgacggttcgcgtatcgtgcataaagttaacggcgaaaaacacgtgctggaacatgagattaagaatcacgaaattggacttaaattggtcctggatcttcttacggacgaaaaatacggtgtgttgaaggatctcaaagaaatcgatgcagttgggcatcgcgtagtacatggcggcgagcgttttgccagtagcgtgaagattactgacgaagtcttaaagaccatcgagacgttgtcgttcttagctccgttacacaatccagcgaacattatgggtatcaagagcagcatgaaagtgttaccgggtgtgcctcaagttgccgtctttgatacagcgttccaccagaagatgccggagaaagcctatttgtacgcaatcccctatgagtactacgagaaatataaaattcgccgctatgggtttcatggaacctcacatcgttatgtgagtaaacgtgctgcggaaattatgggcaaaccgtacgatcagctcaagatcattaccgttcacgtgggtaacggcgcatcagttgcggcggtgaagaatggcgtatctgttgacacttccatgggtttcacaccacttgaaggtcttgtcatgggcacgcgcagcggcgatattgatccggccatcgtggaatttcttgagaaagaagaaggattgtcggccaaagaagtcgtcaacatcctcaacaagaaatctggtgtgtatgggctcaccaaaggctttagtagtgacatgcgtgacattgtggccaaggctattgaaggtgatcctgtatgccgccttgcattagatgtgatgtattatcgtatcgcgaaatatattggcgcatacgctgcggccatgaacggtgttgacgcgatcgtctttaccgcaggagttggcgaaaatagcccgattatgcgcgaagaaattattgagaactacttgggctacttagggatcaagatcgataaagaagccaatgacttccaaggtgaggagaagatcatttcaacgcccgattccaaagtgattgcgatggtagttccgaccaacgaggagctcatgatcgccaaagacacgaaagaaatcattgagaaagggttggacgagcttaagatc

SEQ ID NO: 624 - protein, 417 aa, synthetic construct
  REGION 1..417: note = variant of acetate kinase from Marinitoga sp. 38H-ov
MHHHHHHGGSGMKVLVINSGSSSIKYQLLDMTNEKVLAKGLVERIGIDGSRIVHKVNGEKHVLEHEIKNHEIGLKLVLDLLTDEKYGVLKDLKEIDAVGHRVVHGGERFASSVKITDEVLKTIETLSFLAPLHNPANIMGIKSSMKVLPGVPQVAVFDTAFHQKMPEKAYLYAIPYEYYEKYKIRRYGFHGTSHRYVSKRAAEIMGKPYDQLKIITVHVGNGASVAAVKNGVSVDTSMGFTPLEGLVMGTRSGDIDPAIVEFLEKEEGLSAKEVVNILNKKSGVYGLTKGFSSDMRDIVAKAIEGDPVCRLALDVMYYRIAKYIGAYAAAMNGVDAIVFTAGVGENSPIMREEIIENYLGYLGIKIDKEANDFQGEEKIISTPDSKVIAMVVPTNEELMIAKDTKEIIEKGLDELKI

SEQ ID NO: 625 - DNA, 1251 bp, synthetic construct
  misc_feature 1..1251: note = variant of acetate kinase from Marinitoga sp. 38H-ov
  source 1..1251: mol_type = other DNA
atgcaccatcatcatcatcatggcggtagcggcatgaaagttctggtgattaattctggtagctcctccatcaaatatcagctcctcgatatgaccaacgaaaaggtattagcgaaaggcttggtcgagcgcattggcatcgacggttcgcgtatcgtgcatagtgttaacggcgaaaaacacgtgctggaacatgagattaagaatcacgaaattggacttaaattggtcctggatcttcttacggacgaaaaatacggtgtgttgaaggatctcaaagaaatcgatgcagttgggcatcgcgtagtacatggcggcgagcgttttgccagtagcgtgaagattactgacgaagtcttaaagaccatcgagacgttgtcgttcttagctccgttacacaatccagcgaacattatgggtatcaagagcagcatgaaagtgttaccgggtgtgcctcaagttgccgtctttgatacagcgttccaccagaagatgccggagaaagcctatttgtacgcaatcccctatgagtactacgagaaatataaaattcgccgctatgggtttcatggaacgtcacatcgttatgtgagtaaacgtgctgcggaaattatgggcaaaccgtacgatcagctcaagatcattaccgttcacgtgggtaacggcgcatcagttgcggcggtgaagaatggcgtatctgttgacacttccatgggtttcacaccacttgaaggtcttgtcatgggcacgcgcagcggcgatattgatccggccatcgtggaatttcttgagaaagaagaaggattgtcggccaaagaagtcgtcaacatcctcaacaagaaatctggtgtgtatgggctcaccaaaggctttagtagtgacatgcgtgacattgtggataatgctattgaaggtgatcctgtatgccgccttgcattagatgtgtacgaatatcgtatcgcgaaatatattggcgcatacgctgcggccatgaacggtgttgacgcgatcgtctttaccgcaggagttctggaaaatagcccgattatgcgcgaagaaattattgagaactacttgggctacttagggatcaagatcgataaagaagccaatgacttcaaaggtgaggagaagatcatttcaacgcccgattccaaagtgattgcgatggtagttccgaccaacgaggagctcatgatcgccaaagacacgaaagaaatcattgagaaagggttggacgagcttaagatc

SEQ ID NO: 626 - protein, 417 aa, synthetic construct
  REGION 1..417: note = variant of acetate kinase from Marinitoga sp. 38H-ov
MHHHHHHGGSGMKVLVINSGSSSIKYQLLDMTNEKVLAKGLVERIGIDGSRIVHSVNGEKHVLEHEIKNHEIGLKLVLDLLTDEKYGVLKDLKEIDAVGHRVVHGGERFASSVKITDEVLKTIETLSFLAPLHNPANIMGIKSSMKVLPGVPQVAVFDTAFHQKMPEKAYLYAIPYEYYEKYKIRRYGFHGTSHRYVSKRAAEIMGKPYDQLKIITVHVGNGASVAAVKNGVSVDTSMGFTPLEGLVMGTRSGDIDPAIVEFLEKEEGLSAKEVVNILNKKSGVYGLTKGFSSDMRDIVDNAIEGDPVCRLALDVYEYRIAKYIGAYAAAMNGVDAIVFTAGVLENSPIMREEIIENYLGYLGIKIDKEANDFKGEEKIISTPDSKVIAMVVPTNEELMIAKDTKEIIEKGLDELKI

SEQ ID NO: 627 - DNA, 1251 bp, synthetic construct
  misc_feature 1..1251: note = variant of acetate kinase from Marinitoga sp. 38H-ov
  source 1..1251: mol_type = other DNA
atgcaccatcatcatcatcatggcggtagcggcatgaaagttctggtgattaattctggtagctcctccatcaaatatcagctcctcgatatgaccaacgaaaaggtattagcgaaaggcttggtcgagcgcattggcatcgacggttcgcgtatcgtgcataaagttaacggcgaaaaacacgtgctggaacatgagattaagaatcacgaaattggacttaaattggtcctggatcttcttacggacgaaaaatacggtgtgttgaaggatctcaaagaaatcgatgcagttgggcatcgcgtagtacatggcggcgagcgttttgccagtagcgtgaagattactgacgaagtcttaaagaccatcgagacgttgtcgttcttagctccgttacacaatccagcgaacattatgggtatcaagagcagcatgaaagtgttaccgggtgtgcctcaagttgccgtctttgatacagcgttccaccagaagatgccggagaaagcctatttgtacgcaatcccctatgagtactacgagaaatataaaattcgccgctatgggtttcatggaacctcacatcgttatgtgagtaaacgtgctgcggaaattatgggcaaaccgtacgatcagctcaagatcattaccgttcacgtgggtaacggcgcatcagttgcggcggtgaagaatggcgtatctgttgacacttccatgggtttcacaccacttgaaggtcttgtcatgggcacgcgcagcggcgatattgatccggccatcgtggaatttcttgagaaagaagaaggattgtcggccaaagaagtcgtcaacatcctcaacaagaaatctggtgtgtatgggctcaccaaaggctttagtagtgacatgcgtgacattgtggataatgctattgaaggtgatcctgtatgccgccttgcattagatgtgtatgaatatcgtatcgcgaaatatattggcgcatacgctgcggccatgaacggtgttgacgcgatcgtctttaccgcaggagttggcgaaaatagcccgattatgcgcgaagaaattattgagaactacttgggctacttagggatcaagatcgataaagaagccaatgacttctgcggtgaggagaagatcatttcaacgcccgattccaaagtgattgcgatggtagttccgaccaacgaggagctcatgatcgccaaagacacgaaagaaatcattgagaaagggttggacgagcttaagatc

SEQ ID NO: 628 - protein, 417 aa, synthetic construct
  REGION 1..417: note = variant of acetate kinase from Marinitoga sp. 38H-ov
MHHHHHHGGSGMKVLVINSGSSSIKYQLLDMTNEKVLAKGLVERIGIDGSRIVHKVNGEKHVLEHEIKNHEIGLKLVLDLLTDEKYGVLKDLKEIDAVGHRVVHGGERFASSVKITDEVLKTIETLSFLAPLHNPANIMGIKSSMKVLPGVPQVAVFDTAFHQKMPEKAYLYAIPYEYYEKYKIRRYGFHGTSHRYVSKRAAEIMGKPYDQLKIITVHVGNGASVAAVKNGVSVDTSMGFTPLEGLVMGTRSGDIDPAIVEFLEKEEGLSAKEVVNILNKKSGVYGLTKGFSSDMRDIVDNAIEGDPVCRLALDVYEYRIAKYIGAYAAAMNGVDAIVFTAGVGENSPIMREEIIENYLGYLGIKIDKEANDFCGEEKIISTPDSKVIAMVVPTNEELMIAKDTKEIIEKGLDELKI

SEQ ID NO: 629 - DNA, 1251 bp, synthetic construct
  misc_feature 1..1251: note = variant of acetate kinase from Marinitoga sp. 38H-ov
  source 1..1251: mol_type = other DNA
atgcaccatcatcatcatcatggcggtagcggcatgaaagttctggtgattaattctggtagctcctccatcaaatatcagctcctcgatatgaccaacgaaaaggtattagcgaaaggcttggtcgagcgcattggcatcgacggttcgcgtatcgtgcataaggttaacggcgaaaaacacgtgctggaacatgagattaagaatcacgaaattggacttaaattggtcctggatcttcttacggacgaaaaatacggtgtgttgaaggatctcaaagaaatcgatgcagttgggcatcgcgtagtacatggcggcgagcgttttgccagtagcgtgaagattactgacgaagtcttaaagaccatcgagacgttgtcgttcttagctccgttacacaatccagcgaacattatgggtatcaagagcagcatgaaagtgttaccgggtgtgcctcaagttgccgtctttgatacagcgttccaccagaagatgccggagaaagcctatttgtacgcaatcccctatgagtactacgagaaatataaaattcgccgctatgggtttcatggaacctcacatcgttatgtgagtaaacgtgctgcggaaattatgggcaaaccgtacgatcagctcaagatcattaccgttcacgtgggtaacggcgcatcagttgcggcggtgaagaatggcgtatctgttgacacttccatgggtttcacaccacttgaaggtcttgtcatgggcacgcgcagcggcgatattgatccggccatcgtggaatttcttgagaaagaagaaggattgtcggccaaagaagtcgtcaacatcctcaacaagaaatctggtgtgtatgggctcaccaaaggctttagtagtgacatccgtgacattgtggataatgctattgaaggtgatcctctgtgccgccttgcattagatgtgtacgaatatcgtatcgcgaaatatattggcgcatacgctgcggccatgaacggtgttgacgcgatcgtctttaccgcaggagttggcgaaaatagcccgattatgcgcgaagaaattattgagaactacttgggctacttagggatcaagatcgataaagaagccaatgacttcaaaggtgaggagaagatcatttcaacgcccgattccaaagtgattgcgatggtagttccgaccaacgaggagctcatgatcgccaaagacacgaaagaaatcattgagaaagggttggacgagcttaagatc

SEQ ID NO: 630 - protein, 417 aa, synthetic construct
  REGION 1..417: note = variant of acetate kinase from Marinitoga sp. 38H-ov
MHHHHHHGGSGMKVLVINSGSSSIKYQLLDMTNEKVLAKGLVERIGIDGSRIVHKVNGEKHVLEHEIKNHEIGLKLVLDLLTDEKYGVLKDLKEIDAVGHRVVHGGERFASSVKITDEVLKTIETLSFLAPLHNPANIMGIKSSMKVLPGVPQVAVFDTAFHQKMPEKAYLYAIPYEYYEKYKIRRYGFHGTSHRYVSKRAAEIMGKPYDQLKIITVHVGNGASVAAVKNGVSVDTSMGFTPLEGLVMGTRSGDIDPAIVEFLEKEEGLSAKEVVNILNKKSGVYGLTKGFSSDIRDIVDNAIEGDPLCRLALDVYEYRIAKYIGAYAAAMNGVDAIVFTAGVGENSPIMREEIIENYLGYLGIKIDKEANDFKGEEKIISTPDSKVIAMVVPTNEELMIAKDTKEIIEKGLDELKI

SEQ ID NO: 631 - DNA, 1251 bp, synthetic construct
  misc_feature 1..1251: note = variant of acetate kinase from Marinitoga sp. 38H-ov
  source 1..1251: mol_type = other DNA
atgcaccatcatcatcatcatggcggtagcggcatgaaagttctggtgattaattctggtagctcctccatcaaatatcagctcctcgatatgaccaacgaaaaggtattagcgaaaggcttggtcgagcgcattggcatcgacggttcgcgtatcgtgcataaagttaacggcgaaaaacacgtgctggaacatgagattaagaatcacgaaattggacttaaattggtcctggatcttcttacggacgaaaaatacggtgtgttgaaggatctcaaagaaatcgatgcagttgggcatcgcgtagtacatggcggcgagcgttttgccagtagcgtgaagattactgacgaagtcttaaagaccatcgagacgttgtcgttcttagctccgttacacaatccagcgaacattatgggtatcaagagcagcatgaaagtgttaccgggtgtgcctcaagttgccgtctttgatacagcgttccaccagaagatgccggagaaagcctatttgtacgcaatcccctatgagtactacgagaaatataaaattcgccgctatgggtttcatggaacctcacatcgttatgtgagtaaacgtgctgcggaaattatgggcaaaccgtacgatcagctcaagatcattaccgttcacgtgggtaacggcgcatcagttgcggcggtgaagaatggcgtatctgttgacacttccatgggtttcacaccacttgaaggtcttgtcatgggcacgcgcagcggcgatattgatccggccatcgtggaatttcttgagaaagaagaaggattgtcggccaaagaagtcgtcaacatcctcaacaagaaatctggtgtgtatgggctcaccaaaggctttagtagtgacatgcgtgacattgtgctgaaggctattgaaggtgatcctgtatgccgccttgcattagatgtgtattattatcgtatcgcgaaatatattggcgcatacgctgcggccatgaacggtgttgacgcgatcgtctttaccgcaggagttggcgaaaatagcccgattatgcgcgaagaaattattgagaactacttgggctacttagggatcaagatcgataaagaagccaatgacttcaaaggtgaggagaagatcatttcaacgcccgattccaaagtgattgcgatggtagttccgaccaacgaggagctcatgatcgccaaagacacgaaagaaatcattgagaaagggttggacgagcttaagatc

SEQ ID NO: 632 - protein, 417 aa, synthetic construct
  REGION 1..417: note = variant of acetate kinase from Marinitoga sp. 38H-ov
MHHHHHHGGSGMKVLVINSGSSSIKYQLLDMTNEKVLAKGLVERIGIDGSRIVHKVNGEKHVLEHEIKNHEIGLKLVLDLLTDEKYGVLKDLKEIDAVGHRVVHGGERFASSVKITDEVLKTIETLSFLAPLHNPANIMGIKSSMKVLPGVPQVAVFDTAFHQKMPEKAYLYAIPYEYYEKYKIRRYGFHGTSHRYVSKRAAEIMGKPYDQLKIITVHVGNGASVAAVKNGVSVDTSMGFTPLEGLVMGTRSGDIDPAIVEFLEKEEGLSAKEVVNILNKKSGVYGLTKGFSSDMRDIVLKAIEGDPVCRLALDVYYYRIAKYIGAYAAAMNGVDAIVFTAGVGENSPIMREEIIENYLGYLGIKIDKEANDFKGEEKIISTPDSKVIAMVVPTNEELMIAKDTKEIIEKGLDELKI

SEQ ID NO: 633 - DNA, 1251 bp, synthetic construct
  misc_feature 1..1251: note = variant of acetate kinase from Marinitoga sp. 38H-ov
  source 1..1251: mol_type = other DNA
atgcaccatcatcatcatcatggcggtagcggcatgaaagttctggtgattaattctggtagctcctccatcaaatatcagctcctcgatatgaccaacgaaaaggtattagcgaaaggcttggtcgagcgcattggcatcgacggttcgcgtatcgtgcataaagttaacggcgaaaaacacgtgctggaacatgagattaagaatcacgaaattggacttaaattggtcctggatcttcttacggacgaaaaatacggtgtgttgaaggatctcaaagaaatcgatgcagttgggcatcgcgtagtacatggcggcgagcgttttgccagtagcgtgaagattactgacgaagtcttaaagaccatcgagacgttgtcgttcttagctccgttacacaatccagcgaacattatgggtatcaagagcagcatgaaagtgttaccgggtgtgcctcaagttgccgtctttgatacagcgttccaccagaagatgccggagaaagcctatttgtacgcaatcccctatgagtactacgagaaatataaaattcgccgctatgggtttcatggaacctcacatcgttatgtgagtaaacgtgctgcggaaattatgggcaaaccgtacgatcagctcaagatcattaccgttcacgtgggtaacggcgcatcagttgcggcggtgaagaatggcgtatctgttgacacttccatgggtttcacaccacttgaaggtcttgtcatgggcacgcgcagcggcgatattgatccggccatcgtggaatttcttgagaaagaagaaggattgtcggccaaagaagtcgtcaacatcctcaacaagaaatctggtgtgtatgggctcaccaaaggctttagtagtgacatgcgtgacattgtggaccgcgctattgaaggtgatcctgtatgccgccttgcattagatgtgtattattatcgtatcgcgaaatatattggcgcatacgctgcggccatgaacggtgttgacgcgatcgtctttaccgcaggagttggcgaaaatagcccgattatgcgcgaagaaattattgagaactacttgggctacttagggatcaagatcgataaagaagccaatgacttcaaaggtgaggagaagatcatttcaacgcccgattccaaagtgattgcgatggtagttccgaccaacgaggagctcatgatcgccaaagacacgaaagaaatcattgagaaagggttggacgagcttaagatc

SEQ ID NO: 634 - protein, 417 aa, synthetic construct
  REGION 1..417: note = variant of acetate kinase from Marinitoga sp. 38H-ov
MHHHHHHGGSGMKVLVINSGSSSIKYQLLDMTNEKVLAKGLVERIGIDGSRIVHKVNGEKHVLEHEIKNHEIGLKLVLDLLTDEKYGVLKDLKEIDAVGHRVVHGGERFASSVKITDEVLKTIETLSFLAPLHNPANIMGIKSSMKVLPGVPQVAVFDTAFHQKMPEKAYLYAIPYEYYEKYKIRRYGFHGTSHRYVSKRAAEIMGKPYDQLKIITVHVGNGASVAAVKNGVSVDTSMGFTPLEGLVMGTRSGDIDPAIVEFLEKEEGLSAKEVVNILNKKSGVYGLTKGFSSDMRDIVDRAIEGDPVCRLALDVYYYRIAKYIGAYAAAMNGVDAIVFTAGVGENSPIMREEIIENYLGYLGIKIDKEANDFKGEEKIISTPDSKVIAMVVPTNEELMIAKDTKEIIEKGLDELKI

SEQ ID NO: 635 - DNA, 1251 bp, synthetic construct
  misc_feature 1..1251: note = variant of acetate kinase from Marinitoga sp. 38H-ov
  source 1..1251: mol_type = other DNA
atgcaccatcatcatcatcatggcggtagcggcatgaaagttctggtgattaattctggtagctcctccatcaaatatcagctcctcgatatgaccaacgaaaaggtattagcgaaaggcttggtcgagcgcattggcatcgacggttcgcgtatcgtgcatgaggttaacggcgaaaaacacgtgctggaacatgagattaagaatcacgaaattggacttaaattggtcctggatcttcttacggacgaaaaatacggtgtgttgaaggatctcaaagaaatcgatgcagttgggcatcgcgtagtacatggcggcgagcgttttgccagtagcgtgaagattactgacgaagtcttaaagaccatcgagacgttgtcgttcttagctccgttacacaatccagcgaacattatgggtatcaagagcagcatgaaagtgttaccgggtgtgcctcaagttgccgtctttgatacagcgttccaccagaagatgccggagaaagcctatttgtacgcaatcccctatgagtactacgagaaatataaaattcgccgctatgggtttcatggaacctcacatcgttatgtgagtaaacgtgctgcggaaattatgggcaaaccgtacgatcagctcaagatcattaccgttcacgtgggtaacggcgcatcagttgcggcggtgaagaatggcgtatctgttgacacttccatgggtttcacaccacttgaaggtcttgtcatgggcacgcgcagcggcgatattgatccggccatcgtggaatttcttgagaaagaagaaggattgtcggccaaagaagtcgtcaacatcctcaacaagaaatctggtgtgtatgggctcaccaaaggctttagtagtgacatgcgtgacattgtggataatgctcgcgaaggtgatcctctgtgccgccttgcattagatgtgtacgaatatcgtatcgcgaaatatattggcgcatacgctgcggccatgaacggtgttgacgcgatcgtctttaccgcaggagttggcgaaaatagcccgattatgcgcgaagaaattattgagaactacttgggctacttagggatcaagatcgataaagaagccaatgacttcaaaggtgaggagaagatcatttcaacgcccgattccaaagtgattgcgatggtagttccgaccaacgaggagctcatgatcgccaaagacacgaaagaaatcattgagaaagggttggacgagcttaagatc

SEQ ID NO: 636 - protein, 417 aa, synthetic construct
  REGION 1..417: note = variant of acetate kinase from Marinitoga sp. 38H-ov
MHHHHHHGGSGMKVLVINSGSSSIKYQLLDMTNEKVLAKGLVERIGIDGSRIVHEVNGEKHVLEHEIKNHEIGLKLVLDLLTDEKYGVLKDLKEIDAVGHRVVHGGERFASSVKITDEVLKTIETLSFLAPLHNPANIMGIKSSMKVLPGVPQVAVFDTAFHQKMPEKAYLYAIPYEYYEKYKIRRYGFHGTSHRYVSKRAAEIMGKPYDQLKIITVHVGNGASVAAVKNGVSVDTSMGFTPLEGLVMGTRSGDIDPAIVEFLEKEEGLSAKEVVNILNKKSGVYGLTKGFSSDMRDIVDNAREGDPLCRLALDVYEYRIAKYIGAYAAAMNGVDAIVFTAGVGENSPIMREEIIENYLGYLGIKIDKEANDFKGEEKIISTPDSKVIAMVVPTNEELMIAKDTKEIIEKGLDELKI

SEQ ID NO: 637 - DNA, 1251 bp, synthetic construct
  misc_feature 1..1251: note = variant of acetate kinase from Marinitoga sp. 38H-ov
  source 1..1251: mol_type = other DNA
atgcaccatcatcatcatcatggcggtagcggcatgaaagttctggtgattaattctggtagctcctccatcaaatatcagctcctcgatatgaccaacgaaaaggtattagcgaaaggcttggtcgagcgcattggcatcgacggttcgcgtatcgtgcataaagttaacggcgaaaaacacgtgctggaacatgagattaaaaatcacgaaattggacttaaattggtcctggatcttcttacggacgaaaaatacggtgtgttgaaggatctcaaagaaatcgatgcagttgggcatcgcgtagtacatggcggcgagcgttttgccagtagcgtgaagattactgacgaagtcttaaagaccatcgagacgttgtcgttcttagctccgttacacaatccagcgaacattatgggtatcaagagcagcatgaaagtgttaccgggtgtgcctcaagttgccgtctttgatacagcgttccaccagaagatgccggagaaagcctatttgtacgcaatcccctatgagtactacgagaaatataaaattcgccgctatgggtttcatggaacctcacatcgttatgtgagtaaacgtgctgcggaaattatgggcaaaccgtacgatcagctcaagatcattaccgttcacgtgggtaacggcgcatcagttgcggcggtgaagaatggcgtatctgttgacacttccatgggtttcacaccacttgaaggtcttgtcatgggcacgcgcagcggcgatattgatccggccatcgtggaatttcttgagaaagaagaaggattgtcggccaaagaagtcgtcaacatcctcaacaagaaatctggtgtgtatgggctcaccaaaggctttagtagtgacatgcgtgacattgtggcccgcgctattgaaggtgatcctgtatgccgccttgcattagatgtgtacgaatatcgtatcgcgaaatatattggcgcatacgctgcggccatgaacggtgttgacgcgatcgtctttaccgcaggagttggcgaaaatagcccgattatgcgcgaagaaattattgagaactacttgggctacttagggatcaagatcgataaagaagccaatgacttccaaggtgaggagaagatcatttcaacgcccgattccaaagtgattgcgatggtagttccgaccaacgaggagctcatgatcgccaaagacacgaaagaaatcattgagaaagggttggacgagcttaagatc

SEQ ID NO: 638 - protein, 417 aa, synthetic construct
  REGION 1..417: note = variant of acetate kinase from Marinitoga sp. 38H-ov
MHHHHHHGGSGMKVLVINSGSSSIKYQLLDMTNEKVLAKGLVERIGIDGSRIVHKVNGEKHVLEHEIKNHEIGLKLVLDLLTDEKYGVLKDLKEIDAVGHRVVHGGERFASSVKITDEVLKTIETLSFLAPLHNPANIMGIKSSMKVLPGVPQVAVFDTAFHQKMPEKAYLYAIPYEYYEKYKIRRYGFHGTSHRYVSKRAAEIMGKPYDQLKIITVHVGNGASVAAVKNGVSVDTSMGFTPLEGLVMGTRSGDIDPAIVEFLEKEEGLSAKEVVNILNKKSGVYGLTKGFSSDMRDIVARAIEGDPVCRLALDVYEYRIAKYIGAYAAAMNGVDAIVFTAGVGENSPIMREEIIENYLGYLGIKIDKEANDFQGEEKIISTPDSKVIAMVVPTNEELMIAKDTKEIIEKGLDELKI

SEQ ID NO: 639 - DNA, 1251 bp, synthetic construct
  misc_feature 1..1251: note = variant of acetate kinase from Marinitoga sp. 38H-ov
  source 1..1251: mol_type = other DNA
atgcaccatcatcatcatcatggcggtagcggcatgaaagttctggtgattaattctggtagctcctccatcaaatatcagctcctcgatatgaccaacgaaaaggtattagcgaaaggcttggtcgagcgcattggcatcgacggttcgcgtatcgtgcataaggttaacggcgaaaaacacgtgctggaacatgagattaagaatcacgaaattggacttaaattggtcctggatcttcttacggacgaaaaatacggtgtgttgaaggatctcaaagaaatcgatgcagttgggcatcgcgtagtacatggcggcgagcgttttgccagtagcgtgaagattactgacgaagtcttaaagaccatcgagacgttgtcgttcttagctccgttacacaatccagcgaacattatgggtatcaagagcagcatgaaagtgttaccgggtgtgcctcaagttgccgtctttgatacagcgttccaccagaagatgccggagaaagcctatttgtacgcaatcccctatgagtactacgagaaatataaaattcgccgctatgggtttcatggaacctcacatcgttatgtgagtaaacgtgctgcggaaattatgggcaaaccgtacgatcagctcaagatcattaccgttcacgtgggtaacggcgcatcagttgcggcggtgaagaatggcgtatctgttgacacttccatgggtttcacaccacttgaaggtcttgtcatgggcacgcgcagcggcgatattgatccggccatcgtggaatttcttgagaaagaagaaggattgtcggccaaagaagtcgtcaacatcctcaacaagaaatctggtgtgtatgggctcaccaaaggctttagtagtgacatgcgtgacattgtggataatgctattgaaggtgatcctctgtgccgccttgcattagatgtgtacgaatatcgtatcgcgaaatatattggcgcatacgctgcggccatgaacggtgttgacgcgatcgtctttaccgcaggagttggcgaaaatagcccgattatgcgcgaagaaattattgagaactacttgggctacttagggatcaagatcgataaagaagccaatgacttcaaaggtgaggagaagatcatttcaacgcccgattccaaagtgattgcgatggtagttccgaccaacgaggagctcatgatcgccaaagacacgaaagaaatcattgagaaagggttggacgagcttaagatc

SEQ ID NO: 640 - protein, 417 aa, synthetic construct
  REGION 1..417: note = variant of acetate kinase from Marinitoga sp. 38H-ov
MHHHHHHGGSGMKVLVINSGSSSIKYQLLDMTNEKVLAKGLVERIGIDGSRIVHKVNGEKHVLEHEIKNHEIGLKLVLDLLTDEKYGVLKDLKEIDAVGHRVVHGGERFASSVKITDEVLKTIETLSFLAPLHNPANIMGIKSSMKVLPGVPQVAVFDTAFHQKMPEKAYLYAIPYEYYEKYKIRRYGFHGTSHRYVSKRAAEIMGKPYDQLKIITVHVGNGASVAAVKNGVSVDTSMGFTPLEGLVMGTRSGDIDPAIVEFLEKEEGLSAKEVVNILNKKSGVYGLTKGFSSDMRDIVDNAIEGDPLCRLALDVYEYRIAKYIGAYAAAMNGVDAIVFTAGVGENSPIMREEIIENYLGYLGIKIDKEANDFKGEEKIISTPDSKVIAMVVPTNEELMIAKDTKEIIEKGLDELKI

SEQ ID NO: 641 - DNA, 1251 bp, synthetic construct
  misc_feature 1..1251: note = variant of acetate kinase from Marinitoga sp. 38H-ov
  source 1..1251: mol_type = other DNA
atgcaccatcatcatcatcatggcggtagcggcatgaaagttctggtgattaattctggtagctcctccatcaaatatcagctcctcgatatgaccaacgaaaaggtattagcgaaaggcttggtcgagcgcattggcatcgacggttcgcgtatcgtgcataaagttaacggcgaaaaacacgtgctggaacatgagattaagaatcacgaaattggacttaaattggtcctggatcttcttacggacgaaaaatacggtgtgttgaaggatctcaaagaaatcgatgcagttgggcatcgcgtagtacatggcggcgagcgttttgccagtagcgtgaagattactgacgaagtcttaaagaccatcgagacgttgtcgttcttagctccgttacacaatccagcgaacattatgggtatcaagagcagcatgaaagtgttaccgggtgtgcctcaagttgccgtctttgatacagcgttccaccagaagatgccggagaaagcctatttgtacgcaatcccctatgagtactacgagaaatataaaattcgccgctatgggtttcatggaacctcacatcgttatgtgagtaaacgtgctgcggaaattatgggcaaaccgtacgatcagctcaagatcattaccgttcacgtgggtaacggcgcatcagttgcggcggtgaagaatggcgtatctgttgacacttccatgggtttcacaccacttgaaggtcttgtcatgggcacgcgcagcggcgatattgatccggccatcgtggaatttcttgagaaagaagaaggattgtcggccaaagaagtcgtcaacatcctcaacaagaaatctggtgtgtatgggctcaccaaaggctttagtagtgacatgcgtgacattgtggataatgctattgaaggtgatcctgtatgccgccttgcattagatgtgtaccggtatcgtatcgcgaaatatattggcgcatacgctgcggccatgaacggtgttgacgcgatcgtctttaccgcaggagttggcgaaaatagcccgattatgcgcgaagaaattattgagaactacttgggctacttagggatcaagatcgataaagaagccaatgacttcaaaggtgaggagaagatcatttcaacgcccgattccaaagtgattgcgatggtagttccgaccaacgaggagctcatgatcgccaaagacacgaaagaaatcattgagaaagggttggacgagcttaagatc

SEQ ID NO: 642 - protein, 417 aa, synthetic construct
  REGION 1..417: note = variant of acetate kinase from Marinitoga sp. 38H-ov
MHHHHHHGGSGMKVLVINSGSSSIKYQLLDMTNEKVLAKGLVERIGIDGSRIVHKVNGEKHVLEHEIKNHEIGLKLVLDLLTDEKYGVLKDLKEIDAVGHRVVHGGERFASSVKITDEVLKTIETLSFLAPLHNPANIMGIKSSMKVLPGVPQVAVFDTAFHQKMPEKAYLYAIPYEYYEKYKIRRYGFHGTSHRYVSKRAAEIMGKPYDQLKIITVHVGNGASVAAVKNGVSVDTSMGFTPLEGLVMGTRSGDIDPAIVEFLEKEEGLSAKEVVNILNKKSGVYGLTKGFSSDMRDIVDNAIEGDPVCRLALDVYRYRIAKYIGAYAAAMNGVDAIVFTAGVGENSPIMREEIIENYLGYLGIKIDKEANDFKGEEKIISTPDSKVIAMVVPTNEELMIAKDTKEIIEKGLDELKI

SEQ ID NO: 643 - DNA, 1251 bp, synthetic construct
  misc_feature 1..1251: note = variant of acetate kinase from Marinitoga sp. 38H-ov
  source 1..1251: mol_type = other DNA
atgcaccatcatcatcatcatggcggtagcggcatgaaagttctggtgattaattctggtagctcctccatcaaatatcagctcctcgatatgaccaacgaaaaggtattagcgaaaggcttggtcgagcgcattggcatcgacggttcgcgtatcgtgcataaagttaacggcgaaaaacacgtgctggaacatgagattaagaatcacgaaattggacttaaattggtcctggatcttcttacggacgaaaaatacggtgtgttgaaggatctcaaagaaatcgatgcagttgggcatcgcgtagtacatggcggcgagcgttttgccagtagcgtgaagattactgacgaagtcttaaagaccatcgagacgttgtcgttcttagctccgttacacaatccagcgaacattatgggtatcaagagcagcatgaaagtgttaccgggtgtgcctcaagttgccgtctttgatacagcgttccaccagaagatgccggagaaagcctatttgtacgcaatcccctatgagtactacgagaaatataaaattcgccgctatgggtttcatggaacctcacatcgttatgtgagtaaacgtgctgcggaaattatgggcaaaccgtacgatcagctcaagatcattaccgttcacgtgggtaacggcgcatcagttgcggcggtgaagaatggcgtatctgttgacacttccatgggtttcacaccacttgaaggtcttgtcatgggcacgcgcagcggcgatattgatccggccatcgtggaatttcttgagaaagaagaaggattgtcggccaaagaagtcgtcaacatcctcaacaagaaatctggtgtgtatgggctcattaaaggctttagtagtgacatgcgtgacattgtggataatgctattgaaggtgatcctgtatgccgccttgcattagatgtgtacgaatatcgtatcgcgaaatatattggcgcatacgctgcggccatgaacggtgttgacgcgatcgtctttaccgcaggagttggcgaaaatagcccgattatgcgcgaagaaattattgagaactacttgggctacttagggatcaagatcgataaagaagccaatgacttcaaaggtgaggagaagatcatttcaacgcccgattccaaagtgattgcgatggtagttccgaccaacgaggagctcatgatcgccaaagacacgaaagaaatcattgagaaagggttggacgagcttaagatc

SEQ ID NO: 644 - protein, 417 aa, synthetic construct
  REGION 1..417: note = variant of acetate kinase from Marinitoga sp. 38H-ov
MHHHHHHGGSGMKVLVINSGSSSIKYQLLDMTNEKVLAKGLVERIGIDGSRIVHKVNGEKHVLEHEIKNHEIGLKLVLDLLTDEKYGVLKDLKEIDAVGHRVVHGGERFASSVKITDEVLKTIETLSFLAPLHNPANIMGIKSSMKVLPGVPQVAVFDTAFHQKMPEKAYLYAIPYEYYEKYKIRRYGFHGTSHRYVSKRAAEIMGKPYDQLKIITVHVGNGASVAAVKNGVSVDTSMGFTPLEGLVMGTRSGDIDPAIVEFLEKEEGLSAKEVVNILNKKSGVYGLIKGFSSDMRDIVDNAIEGDPVCRLALDVYEYRIAKYIGAYAAAMNGVDAIVFTAGVGENSPIMREEIIENYLGYLGIKIDKEANDFKGEEKIISTPDSKVIAMVVPTNEELMIAKDTKEIIEKGLDELKI

SEQ ID NO: 645 - DNA, 1251 bp, synthetic construct
  misc_feature 1..1251: note = variant of acetate kinase from Marinitoga sp. 38H-ov
  source 1..1251: mol_type = other DNA
atgcaccatcatcatcatcatggcggtagcggcatgaaagttctggtgattaattctggtagctcctccatcaaatatcagctcctcgatatgaccaacgaaaaggtattagcgaaaggcttggtcgagcgcattggcatcgacggttcgcgtatcgtgcataaagttaacggcgaaaaacacgtgctggaacatgagattaagaatcacgaaattggacttaaattggtcctggatcttcttacggacgaaaaatacggtgtgttgaaggatctcaaagaaatcgatgcagttgggcatcgcgtagtacatggcggcgagcgttttgccagtagcgtgaagattactgacgaagtcttaaagaccatcgagacgttgtcgttcttagctccgttacacaatccagcgaacattatgggtatcaagagcagcatgaaagtgttaccgggtgtgcctcaagttgccgtctttgatacagcgttccaccagaagatgccggagaaagcctatttgtacgcaatcccctatgagtactacgagaaatataaaattcgccgctatgggtttcatggaacctcacatcgttatgtgagtaaacgtgctgcggaaattatgggcaaaccgtacgatcagctcaagatcattaccgttcacgtgggtaacggcgcatcagttgcggcggtgaagaatggcgtatctgttgacacttccatgggtttcacaccacttgaaggtcttgtcatgggcacgcgcagcggcgatattgatccggccatcgtggaatttcttgagaaagaagaaggattgtcggccaaagaagtcgtcaacatcctcaacaagaaatctggtgtgtatgggctcaccaaaggctttagtagtgacatgcgtgacattgtggataatgctattgaaggtgatcctgtatgccgccttgcattagatgtgtacgaatatcgttgggcgaaatatattggcgcatacgctgcggccatgaacggtgttgacgcgatcgtctttaccgcaggagttggcgaaaatagcccgattatgcgcgaagaaattattgagaactacttgggctacttagggatcaagatcgataaagaagccaatgacttcaaaggtgaggagaagatcatttcaacgcccgattccaaagtgattgcgatggtagttccgaccaacgaggagctcatgatcgccaaagacacgaaagaaatcattgagaaagggttggacgagcttaagatc

SEQ ID NO: 646 - protein, 417 aa, synthetic construct
  REGION 1..417: note = variant of acetate kinase from Marinitoga sp. 38H-ov
MHHHHHHGGSGMKVLVINSGSSSIKYQLLDMTNEKVLAKGLVERIGIDGSRIVHKVNGEKHVLEHEIKNHEIGLKLVLDLLTDEKYGVLKDLKEIDAVGHRVVHGGERFASSVKITDEVLKTIETLSFLAPLHNPANIMGIKSSMKVLPGVPQVAVFDTAFHQKMPEKAYLYAIPYEYYEKYKIRRYGFHGTSHRYVSKRAAEIMGKPYDQLKIITVHVGNGASVAAVKNGVSVDTSMGFTPLEGLVMGTRSGDIDPAIVEFLEKEEGLSAKEVVNILNKKSGVYGLTKGFSSDMRDIVDNAIEGDPVCRLALDVYEYRWAKYIGAYAAAMNGVDAIVFTAGVGENSPIMREEIIENYLGYLGIKIDKEANDFKGEEKIISTPDSKVIAMVVPTNEELMIAKDTKEIIEKGLDELKI

SEQ ID NO: 647 - DNA, 1251 bp, synthetic construct
  misc_feature 1..1251: note = variant of acetate kinase from Marinitoga sp. 38H-ov
  source 1..1251: mol_type = other DNA
atgcaccatcatcatcatcatggcggtagcggcatgaaagttctggtgattaattctggtagctcctccatcaaatatcagctcctcgatatgaccaacgaaaaggtattagcgaaaggcttggtcgagcgcattggcatcgacggttcgcgtatcgtgcataaagttaacggcgaaaaacacgtgctggaacatgagattaagaatcacgaaattggacttaaattggtcctggatcttcttacggacgaaaaatacggtgtgttgaaggatctcaaagaaatcgatgcagttgggcatcgcgtagtacatggcggcgagcgttttgccagtagcgtgaagattactgacgaagtcttaaagaccatcgagacgttgtcgttcttagctccgttacacaatccagcgaacattatgggtatcaagagcagcatgaaagtgttaccgggtgtgcctcaagttgccgtctttgatacagcgttccaccagaagatgccggagaaagcctatttgtacgcaatcccctatgagtactacgagaaatataaaattcgccgctatgggtttcatggaacctcacatcgttatgtgagtaaacgtgctgcggaaattatgggcaaaccgtacgatcagctcaagatcattaccgttcacgtgggtaacggcgcatcagttgcggcggtgaagaatggcgtatctgttgacacttccatgggtttcacaccacttgaaggtcttgtcatgggcacgcgcagcggcgatattgatccggccatcgtggaatttcttgagaaagaagaaggattgtcggccaaagaagtcgtcaacatcctcaacaagaaatctggtgtgtatgggctcaccaaaggctttagtagtgacatgcgtgacactgtggataatgctattgaaggtgatcctgtatgccgccttgcattagatgtgtacgaatatcgtatcgcgaaatatattggcgcatacgctgcggccatgaacggtgttgacgcgatcgtctttaccgcaggagttggcgaaaatagcccgattatgcgcgaagaaattattgagaactacttgggctacttagggatcaagatcgataaagaagccaatgacttcaaaggtgaggagaagatcatttcaacgcccgattccaaagtgattgcgatggtagttccgaccaacgaggagctcatgatcgccaaagacacgaaagaaatcattgagaaagggttggacgagcttaagatc

SEQ ID NO: 648 - protein, 417 aa, synthetic construct
  REGION 1..417: note = variant of acetate kinase from Marinitoga sp. 38H-ov
MHHHHHHGGSGMKVLVINSGSSSIKYQLLDMTNEKVLAKGLVERIGIDGSRIVHKVNGEKHVLEHEIKNHEIGLKLVLDLLTDEKYGVLKDLKEIDAVGHRVVHGGERFASSVKITDEVLKTIETLSFLAPLHNPANIMGIKSSMKVLPGVPQVAVFDTAFHQKMPEKAYLYAIPYEYYEKYKIRRYGFHGTSHRYVSKRAAEIMGKPYDQLKIITVHVGNGASVAAVKNGVSVDTSMGFTPLEGLVMGTRSGDIDPAIVEFLEKEEGLSAKEVVNILNKKSGVYGLTKGFSSDMRDTVDNAIEGDPVCRLALDVYEYRIAKYIGAYAAAMNGVDAIVFTAGVGENSPIMREEIIENYLGYLGIKIDKEANDFKGEEKIISTPDSKVIAMVVPTNEELMIAKDTKEIIEKGLDELKI

SEQ ID NO: 649 - DNA, 1251 bp, synthetic construct
  misc_feature 1..1251: note = variant of acetate kinase from Marinitoga sp. 38H-ov
  source 1..1251: mol_type = other DNA
atgcaccatcatcatcatcatggcggtagcggcatgaaagttctggtgattaattctggtagctcctccatcaaatatcagctcctcgatatgaccaacgaaaaggtattagcgaaaggcttggtcgagcgcattggcatcgacggttcgcgtatcgtgcataaagttaacggcgaaaaacacgtgctggaacatgagattaagaatcacgaaattggacttaaattggtcctggatcttcttacggacgaaaaatacggtgtgttgaaggatctcaaagaaatcgatgcagttgggcatcgcgtagtacatggcggcgagcgttttgccagtagcgtgaagattactgacgaagtcttaaagaccatcgagacgttgtcgttcttagctccgttacacaatccagcgaacattatgggtatcaagagcagcatgaaagtgttaccgggtgtgcctcaagttgccgtctttgatacagcgttccaccagaagatgccggagaaagcctatttgtacgcaatcccctatgagtactacgagaaatataaaattcgccgctatgggtttcatggaacctcacatcgttatgtgagtaaacgtgctgcggaaattatgggcaaaccgtacgatcagctcaagatcattaccgttcacgtgggtaacggcgcatcagttgcggcggtgaagaatggcgtatctgttgacacttccatgggtttcacaccacttgaaggtcttgtcatgggcacgcgcagcggcgatattgatccggccatcgtggaatttcttgagaaagaagaaggattgtcggccaaagaagtcgtcaacatcctcaacaagaaatctggtgtgtatgggctcaccaaaggctttagtagtgacatgcgtgacattgtggataatgctattgaaggtgatcctgtatgccgccttggtttagatgtgtacgaatatcgtatcgcgaaatatattggcgcatacgctgcggccatgaacggtgttgacgcgatcgtctttaccgcaggagttggcgaaaatagcccgattatgcgcgaagaaattattgagaactacttgggctacttagggatcaagatcgataaagaagccaatgacttcaaaggtgaggagaagatcatttcaacgcccgattccaaagtgattgcgatggtagttccgaccaacgaggagctcatgatcgccaaagacacgaaagaaatcattgagaaagggttggacgagcttaagatc

SEQ ID NO: 650 - protein, 417 aa, synthetic construct
  REGION 1..417: note = variant of acetate kinase from Marinitoga sp. 38H-ov
MHHHHHHGGSGMKVLVINSGSSSIKYQLLDMTNEKVLAKGLVERIGIDGSRIVHKVNGEKHVLEHEIKNHEIGLKLVLDLLTDEKYGVLKDLKEIDAVGHRVVHGGERFASSVKITDEVLKTIETLSFLAPLHNPANIMGIKSSMKVLPGVPQVAVFDTAFHQKMPEKAYLYAIPYEYYEKYKIRRYGFHGTSHRYVSKRAAEIMGKPYDQLKIITVHVGNGASVAAVKNGVSVDTSMGFTPLEGLVMGTRSGDIDPAIVEFLEKEEGLSAKEVVNILNKKSGVYGLTKGFSSDMRDIVDNAIEGDPVCRLGLDVYEYRIAKYIGAYAAAMNGVDAIVFTAGVGENSPIMREEIIENYLGYLGIKIDKEANDFKGEEKIISTPDSKVIAMVVPTNEELMIAKDTKEIIEKGLDELKI

SEQ ID NO: 651 - DNA, 1251 bp, synthetic construct
  misc_feature 1..1251: note = variant of acetate kinase from Marinitoga sp. 38H-ov
  source 1..1251: mol_type = other DNA
atgcaccatcatcatcatcatggcggtagcggcatgaaagttctggtgattaattctggtagctcctccatcaaatatcagctcctcgatatgaccaacgaaaaggtattagcgaaaggcttggtcgagcgcattggcatcgacggttcgcgtatcgtgcataaagttaacggcgaaaaacacgtgctggaacatgagattaagaatcacgaaattggacttaaattggtcctggatcttcttacggacgaaaaatacggtgtgttgaaggatctcaaagaaatcgatgcagttgggcatcgcgtagtacatggcggcgagcgttttgccagtagcgtgaagattactgacgaagtcttaaagaccatcgagacgttgtcgttcttagctccgttacacaatccagcgaacattatgggtatcaagagcagcatgaaagtgttaccgggtgtgcctcaagttgccgtctttgatacagcgttccaccagaagatgccggagaaagcctatttgtacgcaatcccctatgagtactacgagaaatataaaattcgccgctatgggtttcatggaacctcacatcgttatgtgagtaaacgtgctgcggaaattatgggcaaaccgtacgatcagctcaagatcattaccgttcacgtgggtaacggcgcatcagttgcggcggtgaagaatggcgtatctgttgacacttccatgggtttcacaccacttgaaggtcttgtcatgggcacgcgcagcggcgatattgatccggccatcgtggaatttcttgagaaagaagaaggattgtcggccaaagaagtcgtcaacatcctcaacaagaaatctggtgtgtatgggctcaccaaaggctttagtagtgacatgcgtgacattgtggataatgctattgaaggtgatcctgtatgccgccttgcattagatgtgtactggtatcgtatcgcgaaatatattggcgcatacgctgcggccatgaacggtgttgacgcgatcgtctttaccgcaggagttggcgaaaatagcccgattatgcgcgaagaaattattgagaactacttgggctacttagggatcaagatcgataaagaagccaatgacttcaaaggtgaggagaagatcatttcaacgcccgattccaaagtgattgcgatggtagttccgaccaacgaggagctcatgatcgccaaagacacgaaagaaatcattgagaaagggttggacgagcttaagatc

SEQ ID NO: 652 - protein, 417 aa, synthetic construct
  REGION 1..417: note = variant of acetate kinase from Marinitoga sp. 38H-ov
MHHHHHHGGSGMKVLVINSGSSSIKYQLLDMTNEKVLAKGLVERIGIDGSRIVHKVNGEKHVLEHEIKNHEIGLKLVLDLLTDEKYGVLKDLKEIDAVGHRVVHGGERFASSVKITDEVLKTIETLSFLAPLHNPANIMGIKSSMKVLPGVPQVAVFDTAFHQKMPEKAYLYAIPYEYYEKYKIRRYGFHGTSHRYVSKRAAEIMGKPYDQLKIITVHVGNGASVAAVKNGVSVDTSMGFTPLEGLVMGTRSGDIDPAIVEFLEKEEGLSAKEVVNILNKKSGVYGLTKGFSSDMRDIVDNAIEGDPVCRLALDVYWYRIAKYIGAYAAAMNGVDAIVFTAGVGENSPIMREEIIENYLGYLGIKIDKEANDFKGEEKIISTPDSKVIAMVVPTNEELMIAKDTKEIIEKGLDELKI

SEQ ID NO: 653 - DNA, 1251 bp, synthetic construct
  misc_feature 1..1251: note = variant of acetate kinase from Marinitoga sp. 38H-ov
  source 1..1251: mol_type = other DNA
atgcaccatcatcatcatcatggcggtagcggcatgaaagttctggtgattaattctggtagctcctccatcaaatatcagctcctcgatatgaccaacgaaaaggtattagcgaaaggcttggtcgagcgcattggcatcgacggttcgcgtatcgtgcataaagttaacggcgaaaaacacgtgctggaacatgagattaagaatcacgaaattggacttaaattggtcctggatcttcttacggacgaaaaatacggtgtgttgaaggatctcaaagaaatcgatgcagttgggcatcgcgtagtacatggcggcgagcgttttgccagtagcgtgaagattactgacgaagtcttaaagaccatcgagacgttgtcgttcttagctccgttacacaatccagcgaacattatgggtatcaagagcagcatgaaagtgttaccgggtgtgcctcaagttgccgtctttgatacagcgttccaccagaagatgccggagaaagcctatttgtacgcaatcccctatgagtactacgagaaatataaaattcgccgctatgggtttcatggaacctcacatcgttatgtgagtaaacgtgctgcggaaattatgggcaaaccgtacgatcagctcaagatcattaccgttcacgtgggtaacggcgcatcagttgcggcggtgaagaatggcgtatctgttgacacttccatgggtttcacaccacttgaaggtcttgtcatgggcacgcgcagcggcgatattgatccggccatcgtggaatttcttgagaaagaagaaggattgtcggccaaagaagtcgtcaacatcctcaacaagaaatctggtgtgtatgggctcaataaaggctttagtagtgacatgcgtgacattgtggataatgctattgaaggtgatcctgtatgccgccttgcattagatgtgtacgaatatcgtatcgcgaaatatattggcgcatacgctgcggccatgaacggtgttgacgcgatcgtctttaccgcaggagttggcgaaaatagcccgattatgcgcgaagaaattattgagaactacttgggctacttagggatcaagatcgataaagaagccaatgacttcaaaggtgaggagaagatcatttcaacgcccgattccaaagtgattgcgatggtagttccgaccaacgaggagctcatgatcgccaaagacacgaaagaaatcattgagaaagggttggacgagcttaagatc

SEQ ID NO: 654 - protein, 417 aa, synthetic construct
  REGION 1..417: note = variant of acetate kinase from Marinitoga sp. 38H-ov
MHHHHHHGGSGMKVLVINSGSSSIKYQLLDMTNEKVLAKGLVERIGIDGSRIVHKVNGEKHVLEHEIKNHEIGLKLVLDLLTDEKYGVLKDLKEIDAVGHRVVHGGERFASSVKITDEVLKTIETLSFLAPLHNPANIMGIKSSMKVLPGVPQVAVFDTAFHQKMPEKAYLYAIPYEYYEKYKIRRYGFHGTSHRYVSKRAAEIMGKPYDQLKIITVHVGNGASVAAVKNGVSVDTSMGFTPLEGLVMGTRSGDIDPAIVEFLEKEEGLSAKEVVNILNKKSGVYGLNKGFSSDMRDIVDNAIEGDPVCRLALDVYEYRIAKYIGAYAAAMNGVDAIVFTAGVGENSPIMREEIIENYLGYLGIKIDKEANDFKGEEKIISTPDSKVIAMVVPTNEELMIAKDTKEIIEKGLDELKI

SEQ ID NO: 655 - DNA, 1251 bp, synthetic construct
  misc_feature 1..1251: note = variant of acetate kinase from Marinitoga sp. 38H-ov
  source 1..1251: mol_type = other DNA
atgcaccatcatcatcatcatggcggtagcggcatgaaagttctggtgattaattctggtagctcctccatcaaatatcagctcctcgatatgaccaacgaaaaggtattagcgaaaggcttggtcgagcgcattggcatcgacggttcgcgtatcgtgcataaagttaacggcgaaaaacacgtgctggaacatgagattaagaatcacgaaattggacttaaattggtcctggatcttcttacggacgaaaaatacggtgtgttgaaggatctcaaagaaatcgatgcagttgggcatcgcgtagtacatggcggcgagcgttttgccagtagcgtgaagattactgacgaagtcttaaagaccatcgagacgttgtcgttcttagctccgttacacaatccagcgaacattatgggtatcaagagcagcatgaaagtgttaccgggtgtgcctcaagttgccgtctttgatacagcgttccaccagaagatgccggagaaagcctatttgtacgcaatcccctatgagtactacgagaaatataaaattcgccgctatgggtttcatggaacctcacatcgttatgtgagtaaacgtgctgcggaaattatgggcaaaccgtacgatcagctcaagatcattaccgttcacgtgggtaacggcgcatcagttgcggcggtgaagaatggcgtatctgttgacacttccatgggtttcacaccacttgaaggtcttgtcatgggcacgcgcagcggcgatattgatccggccatcgtggaatttcttgagaaagaagaaggattgtcggccaaagaagtcgtcaacatcctcaacaagaaatctggtgtgtatgggctcaccaaaggctttagtagtgacatgcgtgacattgtggataatgctattgaaggtgatcctgtatgccgccttgcattagatgtgtacgaatatcgtatcgcgaaatatattggcgcatacgctgcggccatgaacggtgttgacgcgatcgtctttaccgcaggagttggcgaaaatagcccgattatgcgcgaagttattattgagaactacttgggctacttagggatcaagatcgataaagaagccaatgacttcaaaggtgaggagaagatcatttcaacgcccgattccaaagtgattgcgatggtagttccgaccaacgaggagctcatgatcgccaaagacacgaaagaaatcattgagaaagggttggacgagcttaagatc

SEQ ID NO: 656 - protein, 417 aa, synthetic construct
  REGION 1..417: note = variant of acetate kinase from Marinitoga sp. 38H-ov
MHHHHHHGGSGMKVLVINSGSSSIKYQLLDMTNEKVLAKGLVERIGIDGSRIVHKVNGEKHVLEHEIKNHEIGLKLVLDLLTDEKYGVLKDLKEIDAVGHRVVHGGERFASSVKITDEVLKTIETLSFLAPLHNPANIMGIKSSMKVLPGVPQVAVFDTAFHQKMPEKAYLYAIPYEYYEKYKIRRYGFHGTSHRYVSKRAAEIMGKPYDQLKIITVHVGNGASVAAVKNGVSVDTSMGFTPLEGLVMGTRSGDIDPAIVEFLEKEEGLSAKEVVNILNKKSGVYGLTKGFSSDMRDIVDNAIEGDPVCRLALDVYEYRIAKYIGAYAAAMNGVDAIVFTAGVGENSPIMREVIIENYLGYLGIKIDKEANDFKGEEKIISTPDSKVIAMVVPTNEELMIAKDTKEIIEKGLDELKI

SEQ ID NO: 657 - DNA, 1251 bp, synthetic construct
  misc_feature 1..1251: note = variant of acetate kinase from Marinitoga sp. 38H-ov
  source 1..1251: mol_type = other DNA
atgcaccatcatcatcatcatggcggtagcggcatgaaagttctggtgattaattctggtagctcctccatcaaatatcagctcctcgatatgaccaacgaaaaggtattagcgaaaggcttggtcgagcgcattggcatcgacggttcgcgtatcgtgcataaagttaacggcgaaaaacacgtgctggaacatgagattaagaatcacgaaattggacttaaattggtcctggatcttcttacggacgaaaaatacggtgtgttgaaggatctcaaagaaatcgatgcagttgggcatcgcgtagtacatggcggcgagcgttttgccagtagcgtgaagattactgacgaagtcttaaagaccatcgagacgttgtcgttcttagctccgttacacaatccagcgaacattatgggtatcaagagcagcatgaaagtgttaccgggtgtgcctcaagttgccgtctttgatacagcgttccaccagaagatgccggagaaagcctatttgtacgcaatcccctatgagtactacgagaaatataaaattcgccgctatgggtttcatggaacctcacatcgttatgtgagtaaacgtgctgcggaaattatgggcaaaccgtacgatcagctcaagatcattaccgttcacgtgggtaacggcgcatcagttgcggcggtgaagaatggcgtatctgttgacacttccatgggtttcacaccacttgaaggtcttgtcatgggcacgcgcagcggcgatattgatccggccatcgtggaatttcttgagaaagaagaaggattgtcggccaaagaagtcgtcaacatcctcaacaagaaatctggtgtgtatgggctcaccaaaggctttagtagtgacatgcgtgacattgtggataatgctattgaaggtgatcctgtatgccgccttgcattagatgtgtacgaatatcgtatcgcgaaatatattggcgcatacgctgcggccatgaacggtgttgacgcgatcgtctttaccgcaggagttggcgaaaatagcagtattatgcgcgaagaaattattgagaactacttgggctacttagggatcaagatcgataaagaagccaatgacttcaaaggtgaggagaagatcatttcaacgcccgattccaaagtgattgcgatggtagttccgaccaacgaggagctcatgatcgccaaagacacgaaagaaatcattgagaaagggttggacgagcttaagatc

SEQ ID NO: 658 - protein, 417 aa, synthetic construct
  REGION 1..417: note = variant of acetate kinase from Marinitoga sp. 38H-ov
MHHHHHHGGSGMKVLVINSGSSSIKYQLLDMTNEKVLAKGLVERIGIDGSRIVHKVNGEKHVLEHEIKNHEIGLKLVLDLLTDEKYGVLKDLKEIDAVGHRVVHGGERFASSVKITDEVLKTIETLSFLAPLHNPANIMGIKSSMKVLPGVPQVAVFDTAFHQKMPEKAYLYAIPYEYYEKYKIRRYGFHGTSHRYVSKRAAEIMGKPYDQLKIITVHVGNGASVAAVKNGVSVDTSMGFTPLEGLVMGTRSGDIDPAIVEFLEKEEGLSAKEVVNILNKKSGVYGLTKGFSSDMRDIVDNAIEGDPVCRLALDVYEYRIAKYIGAYAAAMNGVDAIVFTAGVGENSSIMREEIIENYLGYLGIKIDKEANDFKGEEKIISTPDSKVIAMVVPTNEELMIAKDTKEIIEKGLDELKI

SEQ ID NO: 659 - DNA, 1251 bp, synthetic construct
  misc_feature 1..1251: note = variant of acetate kinase from Marinitoga sp. 38H-ov
  source 1..1251: mol_type = other DNA
atgcaccatcatcatcatcatggcggtagcggcatgaaagttctggtgattaattctggtagctcctccatcaaatatcagctcctcgatatgaccaacgaaaaggtattagcgaaaggcttggtcgagcgcattggcatcgacggttcgcgtatcgtgcataaagttaacggcgaaaaacacgtgctggaacatgagattaagaatcacgaaattggacttaaattggtcctggatcttcttacggacgaaaaatacggtgtgttgaaggatctcaaagaaatcgatgcagttgggcatcgcgtagtacatggcggcgagcgttttgccagtagcgtgaagattactgacgaagtcttaaagaccatcgagacgttgtcgttcttagctccgttacacaatccagcgaacattatgggtatcaagagcagcatgaaagtgttaccgggtgtgcctcaagttgccgtctttgatacagcgttccaccagaagatgccggagaaagcctatttgtacgcaatcccctatgagtactacgagaaatataaaattcgccgctatgggtttcatggaacctcacatcgttatgtgagtaaacgtgctgcggaaattatgggcaaaccgtacgatcagctcaagatcattaccgttcacgtgggtaacggcgcatcagttgcggcggtgaagaatggcgtatctgttgacacttccatgggtttcacaccacttgaaggtcttgtcatgggcacgcgcagcggcgatattgatccggccatcgtggaatttcttgagaaagaagaaggattgtcggccaaagaagtcgtcaacatcctcaacaagaaatctggtgtgtatgggctcaccaaaggctttagtagtgacatgcgtgacattgtggataatgctattgaaggtgatcctgtatgccgccttgcattagatgtgtacgaatatcgtatcgcgaaatatattggcgcatacgctgcggccatgaacggtgttgacgcgatcgtctttaccgcaggagttggcgaaaatagcccgattatgcgcgaagaaattattgagaactacttgggctacttagggatcaagatcgataaagaagccaatgacttcaaaacggaggagaagatcatttcaacgcccgattccaaagtgattgcgatggtagttccgaccaacgaggagctcatgatcgccaaagacacgaaagaaatcattgagaaagggttggacgagcttaagatc

SEQ ID NO: 660 - protein, 417 aa, synthetic construct
  REGION 1..417: note = variant of acetate kinase from Marinitoga sp. 38H-ov
MHHHHHHGGSGMKVLVINSGSSSIKYQLLDMTNEKVLAKGLVERIGIDGSRIVHKVNGEKHVLEHEIKNHEIGLKLVLDLLTDEKYGVLKDLKEIDAVGHRVVHGGERFASSVKITDEVLKTIETLSFLAPLHNPANIMGIKSSMKVLPGVPQVAVFDTAFHQKMPEKAYLYAIPYEYYEKYKIRRYGFHGTSHRYVSKRAAEIMGKPYDQLKIITVHVGNGASVAAVKNGVSVDTSMGFTPLEGLVMGTRSGDIDPAIVEFLEKEEGLSAKEVVNILNKKSGVYGLTKGFSSDMRDIVDNAIEGDPVCRLALDVYEYRIAKYIGAYAAAMNGVDAIVFTAGVGENSPIMREEIIENYLGYLGIKIDKEANDFKTEEKIISTPDSKVIAMVVPTNEELMIAKDTKEIIEKGLDELKI

SEQ ID NO: 661 - DNA, 1251 bp, synthetic construct
  misc_feature 1..1251: note = variant of acetate kinase from Marinitoga sp. 38H-ov
  source 1..1251: mol_type = other DNA
atgcaccatcatcatcatcatggcggtagcggcatgaaagttctggtgattaattctggtagctcctccatcaaatatcagctcctcgatatgaccaacgaaaaggtattagcgaaaggcttggtcgagcgcattggcatcgacggttcgcgtatcgtgcataaagttaacggcgaaaaacacgtgctggaacatgagattaagaatcacgaaattggacttaaattggtcctggatcttcttacggacgaaaaatacggtgtgttgaaggatctcaaagaaatcgatgcagttgggcatcgcgtagtacatggcggcgagcgttttgccagtagcgtgaagattactgacgaagtcttaaagaccatcgagacgttgtcgttcttagctccgttacacaatccagcgaacattatgggtatcaagagcagcatgaaagtgttaccgggtgtgcctcaagttgccgtctttgatacagcgttccaccagaagatgccggagaaagcctatttgtacgcaatcccctatgagtactacgagaaatataaaattcgccgctatgggtttcatggaacctcacatcgttatgtgagtaaacgtgctgcggaaattatgggcaaaccgtacgatcagctcaagatcattaccgttcacgtgggtaacggcgcatcagttgcggcggtgaagaatggcgtatctgttgacacttccatgggtttcacaccacttgaaggtcttgtcatgggcacgcgcagcggcgatattgatccggccatcgtggaatttcttgagaaagaagaaggattgtcggccaaagaagtcgtcaacatcctcaacaagaaatctggtgtgtatgggctcaccaaaggctttagtagtgacatgcgtgacattgtggataatgctatttggggtgatcctgtatgccgccttgcattagatgtgtacgaatatcgtatcgcgaaatatattggcgcatacgctgcggccatgaacggtgttgacgcgatcgtctttaccgcaggagttggcgaaaatagcccgattatgcgcgaagaaattattgagaactacttgggctacttagggatcaagatcgataaagaagccaatgacttcaaaggtgaggagaagatcatttcaacgcccgattccaaagtgattgcgatggtagttccgaccaacgaggagctcatgatcgccaaagacacgaaagaaatcattgagaaagggttggacgagcttaagatc

SEQ ID NO: 662 - protein, 417 aa, synthetic construct
  REGION 1..417: note = variant of acetate kinase from Marinitoga sp. 38H-ov
MHHHHHHGGSGMKVLVINSGSSSIKYQLLDMTNEKVLAKGLVERIGIDGSRIVHKVNGEKHVLEHEIKNHEIGLKLVLDLLTDEKYGVLKDLKEIDAVGHRVVHGGERFASSVKITDEVLKTIETLSFLAPLHNPANIMGIKSSMKVLPGVPQVAVFDTAFHQKMPEKAYLYAIPYEYYEKYKIRRYGFHGTSHRYVSKRAAEIMGKPYDQLKIITVHVGNGASVAAVKNGVSVDTSMGFTPLEGLVMGTRSGDIDPAIVEFLEKEEGLSAKEVVNILNKKSGVYGLTKGFSSDMRDIVDNAIWGDPVCRLALDVYEYRIAKYIGAYAAAMNGVDAIVFTAGVGENSPIMREEIIENYLGYLGIKIDKEANDFKGEEKIISTPDSKVIAMVVPTNEELMIAKDTKEIIEKGLDELKI

SEQ ID NO: 663 - DNA, 1251 bp, synthetic construct
  misc_feature 1..1251: note = variant of acetate kinase from Marinitoga sp. 38H-ov
  source 1..1251: mol_type = other DNA
atgcaccatcatcatcatcatggcggtagcggcatgaaagttctggtgattaattctggtagctcctccatcaaatatcagctcctcgatatgaccaacgaaaaggtattagcgaaaggcttggtcgagcgcattggcatcgacggttcgcgtatcgtgcataaagttaacggcgaaaaacacgtgctggaacatgagattaagaatcacgaaattggacttaaattggtcctggatcttcttacggacgaaaaatacggtgtgttgaaggatctcaaagaaatcgatgcagttgggcatcgcgtagtacatggcggcgagcgttttgccagtagcgtgaagattactgacgaagtcttaaagaccatcgagacgttgtcgttcttagctccgttacacaatccagcgaacattatgggtatcaagagcagcatgaaagtgttaccgggtgtgcctcaagttgccgtctttgatacagcgttccaccagaagatgccggagaaagcctatttgtacgcaatcccctatgagtactacgagaaatataaaattcgccgctatgggtttcatggaacctcacatcgttatgtgagtaaacgtgctgcggaaattatgggcaaaccgtacgatcagctcaagatcattctggttcacgtgggtaacggcgcatcagttgcggcggtgaagaatggcgtatctgttgacacttccatgggtttcacaccacttgaaggtcttgtcatgggcacgcgcagcggcgatattgatccggccatcgtggaatttcttgagaaagaagaaggattgtcggccaaagaagtcgtcaacatcctcaacaagaaatctggtgtgtatgggctcaccaaaggctttagtagtgacatgcgtgacattgtggataatgctattgaaggtgatcctgtatgccgccttgcattagatgtgtacgaatatcgtatcgcgaaatatattggcgcatacgctgcggccatgaacggtgttgacgcgatcgtctttaccgcaggagttggcgaaaatagcccgattatgcgcgaagaaattattgagaactacttgggctacttagggatcaagatcgataaagaagccaatgacttcaaaggtgaggagaagatcatttcaacgcccgattccaaagtgattgcgatggtagttccgaccaacgaggagctcatgatcgccaaagacacgaaagaaatcattgagaaagggttggacgagcttaagatc

SEQ ID NO: 664 - protein, 417 aa, synthetic construct
  REGION 1..417: note = variant of acetate kinase from Marinitoga sp. 38H-ov
MHHHHHHGGSGMKVLVINSGSSSIKYQLLDMTNEKVLAKGLVERIGIDGSRIVHKVNGEKHVLEHEIKNHEIGLKLVLDLLTDEKYGVLKDLKEIDAVGHRVVHGGERFASSVKITDEVLKTIETLSFLAPLHNPANIMGIKSSMKVLPGVPQVAVFDTAFHQKMPEKAYLYAIPYEYYEKYKIRRYGFHGTSHRYVSKRAAEIMGKPYDQLKIILVHVGNGASVAAVKNGVSVDTSMGFTPLEGLVMGTRSGDIDPAIVEFLEKEEGLSAKEVVNILNKKSGVYGLTKGFSSDMRDIVDNAIEGDPVCRLALDVYEYRIAKYIGAYAAAMNGVDAIVFTAGVGENSPIMREEIIENYLGYLGIKIDKEANDFKGEEKIISTPDSKVIAMVVPTNEELMIAKDTKEIIEKGLDELKI

SEQ ID NO: 665 - DNA, 1251 bp, synthetic construct
  misc_feature 1..1251: note = variant of acetate kinase from Marinitoga sp. 38H-ov
  source 1..1251: mol_type = other DNA
atgcaccatcatcatcatcatggcggtagcggcatgaaagttctggtgattaattctggtagctcctccatcaaatatcagctcctcgatatgaccaacgaaaaggtattagcgaaaggcttggtcgagcgcattggcatcgacggttcgcgtatcgtgcataaagttaacggcgaaaaacacgtgctggaacatgagattaagaatcacgaaattggacttaaattggtcctggatcttcttacggacgaaaaatacggtgtgttgaaggatctcaaagaaatcgatgcagttgggcatcgcgtagtacatggcggcgagcgttttgccagtagcgtgaagattactgacgaagtcttaaagaccatcgagacgttgtcgttcttagctccgttacacaatccagcgaacattatgggtatcaagagcagcatgaaagtgttaccgggtgtgcctcaagttgccgtctttgatacagcgttccaccagaagatgccggagaaagcctatttgtacgcaatcccctatgagtactacgagaaatataaaattcgccgctatgggtttcatggaacctcacatcgttatgtgagtaaacgtgctgcggaaattatgggcaaaccgtacgatcagctcaagatcattaccccgcacgtgggtaacggcgcatcagttgcggcggtgaagaatggcgtatctgttgacacttccatgggtttcacaccacttgaaggtcttgtcatgggcacgcgcagcggcgatattgatccggccatcgtggaatttcttgagaaagaagaaggattgtcggccaaagaagtcgtcaacatcctcaacaagaaatctggtgtgtatgggctcaccaaaggctttagtagtgacatgcgtgacattgtggataatgctattgaaggtgatcctgtatgccgccttgcattagatgtgtacgaatatcgtatcgcgaaatatattggcgcatacgctgcggccatgaacggtgttgacgcgatcgtctttaccgcaggagttggcgaaaatagcccgattatgcgcgaagaaattattgagaactacttgggctacttagggatcaagatcgataaagaagccaatgacttcaaaggtgaggagaagatcatttcaacgcccgattccaaagtgattgcgatggtagttccgaccaacgaggagctcatgatcgccaaagacacgaaagaaatcattgagaaagggttggacgagcttaagatc

SEQ ID NO: 666 - protein, 417 aa, synthetic construct
  REGION 1..417: note = variant of acetate kinase from Marinitoga sp. 38H-ov
MHHHHHHGGSGMKVLVINSGSSSIKYQLLDMTNEKVLAKGLVERIGIDGSRIVHKVNGEKHVLEHEIKNHEIGLKLVLDLLTDEKYGVLKDLKEIDAVGHRVVHGGERFASSVKITDEVLKTIETLSFLAPLHNPANIMGIKSSMKVLPGVPQVAVFDTAFHQKMPEKAYLYAIPYEYYEKYKIRRYGFHGTSHRYVSKRAAEIMGKPYDQLKIITPHVGNGASVAAVKNGVSVDTSMGFTPLEGLVMGTRSGDIDPAIVEFLEKEEGLSAKEVVNILNKKSGVYGLTKGFSSDMRDIVDNAIEGDPVCRLALDVYEYRIAKYIGAYAAAMNGVDAIVFTAGVGENSPIMREEIIENYLGYLGIKIDKEANDFKGEEKIISTPDSKVIAMVVPTNEELMIAKDTKEIIEKGLDELKI

SEQ ID NO: 667 - DNA, 1251 bp, synthetic construct
  misc_feature 1..1251: note = variant of acetate kinase from Marinitoga sp. 38H-ov
  source 1..1251: mol_type = other DNA
atgcaccatcatcatcatcatggcggtagcggcatgaaagttctggtgattaattctggtagctcctccatcaaatatcagctcctcgatatgaccaacgaaaaggtattagcgaaaggcttggtcgagcgcattggcatcgacggttcgcgtatcgtgcataaagttaacggcgaaaaacacgtgctggaacatgagattaagaatcacgaaattggacttaaattggtcctggatcttcttacggacgaaaaatacggtgtgttgaaggatctcaaagaaatcgatgcagttgggcatcgcgtagtacatggcggcgagcgttttgccagtagcgtgaagattactgacgaagtcttaaagaccatcgagacgttgtcgttcttagctccgttacacaatccagcgaacattatgggtatcaagagcagcatgaaagtgttaccgggtgtgcctcaagttgccgtctttgatacagcgttccaccagaagatgccggagaaagcctatttgtacgcaatcccctatgagtactacgagaaatataaaattcgccgctatgggtttcatggaacctcacatcgttatgtgagtaaacgtgctgcggaaattatgggcaaaccgtacgatcagctcaagatcattaccgttcacgtgggtaacggcgcatcagttgcggcggtgaagaatggcgtatctgttgacacttccatgggtttcacaccacttgaaggtcttgtcatgggcacgcgcagcggcgatattgatccggccatcgtggaatttcttgagaaagaagaaggattgtcggccaaagaagtcgtcaacatcctcaacaagaaatctggtgtgtatgggctcaccaaaggctttagtagtgacatgcgtgacattgtggataatgctattgaaggtgatcctgtatgccgccttgcattagatgtgtacgaatatcgtatcgcgaaatatattggcgcatacgctgcggccatgaacggtgttgacgcgatcgtctttaccgcaggagttggcgaaaatagcccgattatgcgcgaagaaattattgagaactacttgggctacttagggatcaagatcgataaagaagccaatgacttcaaaggtgaggagaagatcatttcaacgcccgattccaaagtgattgcgatgggggttccgaccaacgaggagctcatgatcgccaaagacacgaaagaaatcattgagaaagggttggacgagcttaagatc

SEQ ID NO: 668 - protein, 417 aa, synthetic construct
  REGION 1..417: note = variant of acetate kinase from Marinitoga sp. 38H-ov
MHHHHHHGGSGMKVLVINSGSSSIKYQLLDMTNEKVLAKGLVERIGIDGSRIVHKVNGEKHVLEHEIKNHEIGLKLVLDLLTDEKYGVLKDLKEIDAVGHRVVHGGERFASSVKITDEVLKTIETLSFLAPLHNPANIMGIKSSMKVLPGVPQVAVFDTAFHQKMPEKAYLYAIPYEYYEKYKIRRYGFHGTSHRYVSKRAAEIMGKPYDQLKIITVHVGNGASVAAVKNGVSVDTSMGFTPLEGLVMGTRSGDIDPAIVEFLEKEEGLSAKEVVNILNKKSGVYGLTKGFSSDMRDIVDNAIEGDPVCRLALDVYEYRIAKYIGAYAAAMNGVDAIVFTAGVGENSPIMREEIIENYLGYLGIKIDKEANDFKGEEKIISTPDSKVIAMGVPTNEELMIAKDTKEIIEKGLDELKI

SEQ ID NO: 669 - DNA, 1251 bp, synthetic construct
  misc_feature 1..1251: note = variant of acetate kinase from Marinitoga sp. 38H-ov
  source 1..1251: mol_type = other DNA
atgcaccatcatcatcatcatggcggtagcggcatgaaagttctggtgattaattctggtagctcctccatcaaatatcagctcctcgatatgaccaacgaaaaggtattagcgaaaggcttggtcgagcgcattggcatcgacggttcgcgtatcgtgcataaagttaacggcgaaaaacacgtgctggaacatgagattaagaatcacgaaattggacttaaattggtcctggatcttcttacggacgaaaaatacggtgtgttgaaggatctcaaagaaatcgatgcagttgggcatcgcgtagtacatggcggcgagcgttttgccagtagcgtgaagattactgacgaagtcttaaagaccatcgagacgttgtcgttcttagctccgttacacaatccagcgaacattatgggtatcaagagcagcatgaaagtgttaccgggtgtgcctcaagttgccgtctttgatacagcgttccaccagaagatgccggagaaagcctatttgtacgcaatcccctatgagtactacgagaaatataaaattcgccgctatgggtttcatggaacctcacatcgttatgtgagtaaacgtgctgcggaaattatgggcaaaccgtacgatcagctcaagatcattaccgttcacgtgggtaacggcgcatcagttgcggcggtgaagaatggcgtatctgttgacacttccatgggtttcacaccacttgaaggtcttgtcatgggcacgcgcagcggcgatattgatccggccatcgtggaatttcttgagaaagaagaaggattgtcggccaaagaagtcgtcaacatcctcaacaagaaatctggtgtgtatgggctcaccaaaggctttacgagtgacatgcgtgacattgtggataatgctattgaaggtgatcctgtatgccgccttgcattagatgtgtacgaatatcgtatcgcgaaatatattggcgcatacgctgcggccatgaacggtgttgacgcgatcgtctttaccgcaggagttggcgaaaatagcccgattatgcgcgaagaaattattgagaactacttgggctacttagggatcaagatcgataaagaagccaatgacttcaaaggtgaggagaagatcatttcaacgcccgattccaaagtgattgcgatggtagttccgaccaacgaggagctcatgatcgccaaagacacgaaagaaatcattgagaaagggttggacgagcttaagatc

SEQ ID NO: 670 - protein, 417 aa, synthetic construct
  REGION 1..417: note = variant of acetate kinase from Marinitoga sp. 38H-ov
MHHHHHHGGSGMKVLVINSGSSSIKYQLLDMTNEKVLAKGLVERIGIDGSRIVHKVNGEKHVLEHEIKNHEIGLKLVLDLLTDEKYGVLKDLKEIDAVGHRVVHGGERFASSVKITDEVLKTIETLSFLAPLHNPANIMGIKSSMKVLPGVPQVAVFDTAFHQKMPEKAYLYAIPYEYYEKYKIRRYGFHGTSHRYVSKRAAEIMGKPYDQLKIITVHVGNGASVAAVKNGVSVDTSMGFTPLEGLVMGTRSGDIDPAIVEFLEKEEGLSAKEVVNILNKKSGVYGLTKGFTSDMRDIVDNAIEGDPVCRLALDVYEYRIAKYIGAYAAAMNGVDAIVFTAGVGENSPIMREEIIENYLGYLGIKIDKEANDFKGEEKIISTPDSKVIAMVVPTNEELMIAKDTKEIIEKGLDELKI

SEQ ID NO: 671 - DNA, 1251 bp, synthetic construct
  misc_feature 1..1251: note = variant of acetate kinase from Marinitoga sp. 38H-ov
  source 1..1251: mol_type = other DNA
atgcaccatcatcatcatcatggcggtagcggcatgaaagttctggtgattaattctggtagctcctccatcaaatatcagctcctcgatatgaccaacgaaaaggtattagcgaaaggcttggtcgagcgcattggcatcgacggttcgcgtatcgtgcataaagttaacggcgaaaaacacgtgctggaacatgagattaagaatcacgaaattggacttaaattggtcctggatcttcttacggacgaaaaatacggtgtgttgaaggatctcaaagaaatcgatgcagttgggcatcgcgtagtacatggcggcgagcgttttgccagtagcgtgaagattactgacgaagtcttaaagaccatcgagacgttgtcgttcttagctccgttacacaatccagcgaacattatgggtatcaagagcagcatgaaagtgttaccgggtgtgcctcaagttgccgtctttgatacagcgttccaccagaagatgccggagaaagcctatttgtacgcaatcccctatgagtactacgagaaatataaaattcgccgctatgggtttcatggaacctcacatcgttatgtgagtaaacgtgctgcggaaattatgggcaaaccgtacgatcagctcaagatcattaccgttcacgtgggtaacggcgcatcagttgcggcggtgaagaatggcgtatctgttgacacttccatgggtttcacaccacttgaaggtcttgtcatgggcacgcgcagcggcgatattgatccggccatcgtggaatttcttgagaaagaagaaggattgtcggccaaagaagtcgtcaacatcctcaacaagaaatctggtgtggtggggctcaccaaaggctttagtagtgacatgcgtgacattgtggataatgctattgaaggtgatcctgtatgccgccttgcattagatgtgtacgaatatcgtatcgcgaaatatattggcgcatacgctgcggccatgaacggtgttgacgcgatcgtctttaccgcaggagttggcgaaaatagcccgattatgcgcgaagaaattattgagaactacttgggctacttagggatcaagatcgataaagaagccaatgacttcaaaggtgaggagaagatcatttcaacgcccgattccaaagtgattgcgatggtagttccgaccaacgaggagctcatgatcgccaaagacacgaaagaaatcattgagaaagggttggacgagcttaagatc

SEQ ID NO: 672 - protein, 417 aa, synthetic construct
  REGION 1..417: note = variant of acetate kinase from Marinitoga sp. 38H-ov
MHHHHHHGGSGMKVLVINSGSSSIKYQLLDMTNEKVLAKGLVERIGIDGSRIVHKVNGEKHVLEHEIKNHEIGLKLVLDLLTDEKYGVLKDLKEIDAVGHRVVHGGERFASSVKITDEVLKTIETLSFLAPLHNPANIMGIKSSMKVLPGVPQVAVFDTAFHQKMPEKAYLYAIPYEYYEKYKIRRYGFHGTSHRYVSKRAAEIMGKPYDQLKIITVHVGNGASVAAVKNGVSVDTSMGFTPLEGLVMGTRSGDIDPAIVEFLEKEEGLSAKEVVNILNKKSGVVGLTKGFSSDMRDIVDNAIEGDPVCRLALDVYEYRIAKYIGAYAAAMNGVDAIVFTAGVGENSPIMREEIIENYLGYLGIKIDKEANDFKGEEKIISTPDSKVIAMVVPTNEELMIAKDTKEIIEKGLDELKI

SEQ ID NO: 673 - DNA, 1251 bp, synthetic construct
  misc_feature 1..1251: note = variant of acetate kinase from Marinitoga sp. 38H-ov
  source 1..1251: mol_type = other DNA
atgcaccatcatcatcatcatggcggtagcggcatgaaagttctggtgattaattctggtagctcctccatcaaatatcagctcctcgatatgaccaacgaaaaggtattagcgaaaggcttggtcgagcgcattggcatcgacggttcgcgtatcgtgcataaagttaacggcgaaaaacacgtgctggaacatgagattaagaatcacgaaattggacttaaattggtcctggatcttcttacggacgaaaaatacggtgtgttgaaggatctcaaagaaatcgatgcagttgggcatcgcgtagtacatggcggcgagcgttttgccagtagcgtgaagattactgacgaagtcttaaagaccatcgagacgttgtcgttcttagctccgttacacaatccagcgaacattatgggtatcaagagcagcatgaaagtgttaccgggtgtgcctcaagttgccgtctttgatacagcgttccaccagaagatgccggagaaagcctatttgtacgcaatcccctatgagtactacgagaaatataaaattcgccgctatgggtttcatggaacctcacatcgttatgtgagtaaacgtgctgcggaaattatgggcaaaccgtacgatcagctcaagatcattaccgttcacgtgggtaacggcgcatcacttgcggcggtgaagaatggcgtatctgttgacacttccatgggtttcacaccacttgaaggtcttgtcatgggcacgcgcagcggcgatattgatccggccatcgtggaatttcttgagaaagaagaaggattgtcggccaaagaagtcgtcaacatcctcaacaagaaatctggtgtgtatgggctcaccaaaggctttagtagtgacatgcgtgacattgtggataatgctattgaaggtgatcctgtatgccgccttgcattagatgtgtacgaatatcgtatcgcgaaatatattggcgcatacgctgcggccatgaacggtgttgacgcgatcgtctttaccgcaggagttggcgaaaatagcccgattatgcgcgaagaaattattgagaactacttgggctacttagggatcaagatcgataaagaagccaatgacttcaaaggtgaggagaagatcatttcaacgcccgattccaaagtgattgcgatggtagttccgaccaacgaggagctcatgatcgccaaagacacgaaagaaatcattgagaaagggttggacgagcttaagatc

SEQ ID NO: 674 - protein, 417 aa, synthetic construct
  REGION 1..417: note = variant of acetate kinase from Marinitoga sp. 38H-ov
MHHHHHHGGSGMKVLVINSGSSSIKYQLLDMTNEKVLAKGLVERIGIDGSRIVHKVNGEKHVLEHEIKNHEIGLKLVLDLLTDEKYGVLKDLKEIDAVGHRVVHGGERFASSVKITDEVLKTIETLSFLAPLHNPANIMGIKSSMKVLPGVPQVAVFDTAFHQKMPEKAYLYAIPYEYYEKYKIRRYGFHGTSHRYVSKRAAEIMGKPYDQLKIITVHVGNGASLAAVKNGVSVDTSMGFTPLEGLVMGTRSGDIDPAIVEFLEKEEGLSAKEVVNILNKKSGVYGLTKGFSSDMRDIVDNAIEGDPVCRLALDVYEYRIAKYIGAYAAAMNGVDAIVFTAGVGENSPIMREEIIENYLGYLGIKIDKEANDFKGEEKIISTPDSKVIAMVVPTNEELMIAKDTKEIIEKGLDELKI

SEQ ID NO: 675 - DNA, 1251 bp, synthetic construct
  misc_feature 1..1251: note = variant of acetate kinase from Marinitoga sp. 38H-ov
  source 1..1251: mol_type = other DNA
atgcaccatcatcatcatcatggcggtagcggcatgaaagttctggtgattaattctggtagctcctccatcaaatatcagctcctcgatatgaccaacgaaaaggtattagcgaaaggcttggtcgagcgcattggcatcgacggttcgcgtatcgtgcataaagttaacggcgaaaaacacgtgctggaacatgagattaagaatcacgaaattggacttaaattggtcctggatcttcttacggacgaaaaatacggtgtgttgaaggatctcaaagaaatcgatgcagttgggcatcgcgtagtacatggcggcgagcgttttgccagtagcgtgaagattactgacgaagtcttaaagaccatcgagacgttgtcgttcttagctccgttacacaatccagcgaacattatgggtatcaagagcagcatgaaagtgttaccgggtgtgcctcaagttgccgtctttgatacagcgttccaccagaagatgccggagaaagcctatttgtacgcaatcccctatgagtactacgagaaatataaaattcgccgctatgggtttcatggaacctcacatcgttatgtgagtaaacgtgctgcggaaattatgggcaaaccgtacgatcagctcaagatcattaccgttcacgtgggtaacggcgcatcagttgcggcggtgaagaatggcgtatctgttgacacttccatgggtttcacaccacttgaaggtcttgtcatgggcacgcgcagcggcgatattgatccggccatcgtggaatttcttgagaaagaagaaggattgtcggccaaagaagtcgtcaacatcctcaacaagaaatctggtgtgtatgggctcaccaaaggctttagtagtgacatgcgtgacattgtggataatgctattgaaggtgatcctgtatgccgccttgcattagatgtgtacgaatatcgtatcgcgaaatatattggcgcatacgctgcggccatgaacggtgttgacgcgatcgtctttaccgcaggagttggcgaaaatagcccgattatgcgcgaagaaattattgagaactacttgggctacttagggatcaagatcgataaagaagccaatgaccctaaaggtgaggagaagatcatttcaacgcccgattccaaagtgattgcgatggtagttccgaccaacgaggagctcatgatcgccaaagacacgaaagaaatcattgagaaagggttggacgagcttaagatc

SEQ ID NO: 676 - protein, 417 aa, synthetic construct
  REGION 1..417: note = variant of acetate kinase from Marinitoga sp. 38H-ov
MHHHHHHGGSGMKVLVINSGSSSIKYQLLDMTNEKVLAKGLVERIGIDGSRIVHKVNGEKHVLEHEIKNHEIGLKLVLDLLTDEKYGVLKDLKEIDAVGHRVVHGGERFASSVKITDEVLKTIETLSFLAPLHNPANIMGIKSSMKVLPGVPQVAVFDTAFHQKMPEKAYLYAIPYEYYEKYKIRRYGFHGTSHRYVSKRAAEIMGKPYDQLKIITVHVGNGASVAAVKNGVSVDTSMGFTPLEGLVMGTRSGDIDPAIVEFLEKEEGLSAKEVVNILNKKSGVYGLTKGFSSDMRDIVDNAIEGDPVCRLALDVYEYRIAKYIGAYAAAMNGVDAIVFTAGVGENSPIMREEIIENYLGYLGIKIDKEANDPKGEEKIISTPDSKVIAMVVPTNEELMIAKDTKEIIEKGLDELKI

SEQ ID NO: 677 - DNA, 1251 bp, synthetic construct
  misc_feature 1..1251: note = variant of acetate kinase from Marinitoga sp. 38H-ov
  source 1..1251: mol_type = other DNA
atgcaccatcatcatcatcatggcggtagcggcatgaaagttctggtgattaattctggtagctcctccatcaaatatcagctcctcgatatgaccaacgaaaaggtattagcgaaaggcttggtcgagcgcattggcatcgacggttcgcgtatcgtgcataaagttaacggcgaaaaacacgtgctggaacatgagattaagaatcacgaaattggacttaaattggtcctggatcttcttacggacgaaaaatacggtgtgttgaaggatctcaaagaaatcgatgcagttgggcatcgcgtagtacatggcggcgagcgttttgccagtagcgtgaagattactgacgaagtcttaaagaccatcgagacgttgtcgttcttagctccgttacacaatccagcgaacattatgggtatcaagagcagcatgaaagtgttaccgggtgtgcctcaagttgccgtctttgatacagcgttccaccagaagatgccggagaaagcctatttgtacgcaatcccctatgagtactacgagaaatataaaattcgccgctatgggtttcatggaacctcacatcgttatgtgagtaaacgtgctgcggaaattatgggcaaaccgtacgatcagctcaagatcattaccgttcacgtgggtaacggcgcatcagttgcggcggtgaagaatggcgtatctgttgacacttccatgggtttcacaccacttgaaggtcttgtcatgggcacgcgcagcggcgatattgatccggccatcgtggaatttcttgagaaagaagaaggattgtcggccaaagaagtcgtcaacatcctcaacaagaaatctggtgtgtatgggctcaccaaaggctttagtagtgacatgcgtgacattgtggataatgctattgaaggtgatcctgtatgccgccttgcattagatgtgtacgaatatcgtatcgcgaaatatattggcgcatacgctgcggccatgaacggtgttgacgcgatcgtctttaccgcaggagttggcgaaaatagccttattatgcgcgaagaaattattgagaactacttgggctacttagggatcaagatcgataaagaagccaatgacttcaaaggtgaggagaagatcatttcaacgcccgattccaaagtgattgcgatggtagttccgaccaacgaggagctcatgatcgccaaagacacgaaagaaatcattgagaaagggttggacgagcttaagatc

SEQ ID NO: 678 - protein, 417 aa, synthetic construct
  REGION 1..417: note = variant of acetate kinase from Marinitoga sp. 38H-ov
MHHHHHHGGSGMKVLVINSGSSSIKYQLLDMTNEKVLAKGLVERIGIDGSRIVHKVNGEKHVLEHEIKNHEIGLKLVLDLLTDEKYGVLKDLKEIDAVGHRVVHGGERFASSVKITDEVLKTIETLSFLAPLHNPANIMGIKSSMKVLPGVPQVAVFDTAFHQKMPEKAYLYAIPYEYYEKYKIRRYGFHGTSHRYVSKRAAEIMGKPYDQLKIITVHVGNGASVAAVKNGVSVDTSMGFTPLEGLVMGTRSGDIDPAIVEFLEKEEGLSAKEVVNILNKKSGVYGLTKGFSSDMRDIVDNAIEGDPVCRLALDVYEYRIAKYIGAYAAAMNGVDAIVFTAGVGENSLIMREEIIENYLGYLGIKIDKEANDFKGEEKIISTPDSKVIAMVVPTNEELMIAKDTKEIIEKGLDELKI

SEQ ID NO: 679 - DNA, 1251 bp, synthetic construct
  misc_feature 1..1251: note = variant of acetate kinase from Marinitoga sp. 38H-ov
  source 1..1251: mol_type = other DNA
atgcaccatcatcatcatcatggcggtagcggcatgaaagttctggtgattaattctggtagctcctccatcaaatatcagctcctcgatatgaccaacgaaaaggtattagcgaaaggcttggtcgagcgcattggcatcgacggttcgcgtatcgtgcataaagttaacggcgaaaaacacgtgctggaacatgagattaagaatcacgaaattggacttaaattggtcctggatcttcttacggacgaaaaatacggtgtgttgaaggatctcaaagaaatcgatgcagttgggcatcgcgtagtacatggcggcgagcgttttgccagtagcgtgaagattactgacgaagtcttaaagaccatcgagacgttgtcgttcttagctccgttacacaatccagcgaacattatgggtatcaagagcagcatgaaagtgttaccgggtgtgcctcaagttgccgtctttgatacagcgttccaccagaagatgccggagaaagcctatttgtacgcaatcccctatgagtactacgagaaatataaaattcgccgctatgggtttcatggaacctcacatcgttatgtgagtaaacgtgctgcggaaattatgggcaaaccgtacgatcagctcaagatcattaccgttcacgtgggtaacggcgcatcagttgcggcggtgaagaatggcgtatctgttgacacttccatgggtttcacaccacttgaaggtcttgtcatgggcacgcgcagcggcgatattgatccggccatcgtggaatttcttgagaaagaagaaggattgtcggccaaagaagtcgtcaacatcctcaacaagaaatctggtgtgtatgggctcaccaaaggctttagtagtgacatgcgtgacattgtggataatgctattgaaggtgatcctgtatgccgccttgcattagatgtgtacgaatatcgtatcgcgaaatatattggcgcatacgctgcggccatgaacggtgttgacgcgatcgtctttaccgcaggagttggcgaaaatagcccgattatgcgcgaaaggattattgagaactacttgggctacttagggatcaagatcgataaagaagccaatgacttcaaaggtgaggagaagatcatttcaacgcccgattccaaagtgattgcgatggtagttccgaccaacgaggagctcatgatcgccaaagacacgaaagaaatcattgagaaagggttggacgagcttaagatc

SEQ ID NO: 680 - protein, 417 aa, synthetic construct
  REGION 1..417: note = variant of acetate kinase from Marinitoga sp. 38H-ov
MHHHHHHGGSGMKVLVINSGSSSIKYQLLDMTNEKVLAKGLVERIGIDGSRIVHKVNGEKHVLEHEIKNHEIGLKLVLDLLTDEKYGVLKDLKEIDAVGHRVVHGGERFASSVKITDEVLKTIETLSFLAPLHNPANIMGIKSSMKVLPGVPQVAVFDTAFHQKMPEKAYLYAIPYEYYEKYKIRRYGFHGTSHRYVSKRAAEIMGKPYDQLKIITVHVGNGASVAAVKNGVSVDTSMGFTPLEGLVMGTRSGDIDPAIVEFLEKEEGLSAKEVVNILNKKSGVYGLTKGFSSDMRDIVDNAIEGDPVCRLALDVYEYRIAKYIGAYAAAMNGVDAIVFTAGVGENSPIMRERIIENYLGYLGIKIDKEANDFKGEEKIISTPDSKVIAMVVPTNEELMIAKDTKEIIEKGLDELKI

SEQ ID NO: 681 - DNA, 1251 bp, synthetic construct
  misc_feature 1..1251: note = variant of acetate kinase from Marinitoga sp. 38H-ov
  source 1..1251: mol_type = other DNA
atgcaccatcatcatcatcatggcggtagcggcatgaaagttctggtgattaattctggtagctcctccatcaaatatcagctcctcgatatgaccaacgaaaaggtattagcgaaaggcttggtcgagcgcattggcatcgacggttcgcgtatcgtgcataaagttaacggcgaaaaacacgtgctggaacatgagattaagaatcacgaaattggacttaaattggtcctggatcttcttacggacgaaaaatacggtgtgttgaaggatctcaaagaaatcgatgcagttgggcatcgcgtagtacatggcggcgagcgttttgccagtagcgtgaagattactgacgaagtcttaaagaccatcgagacgttgtcgttcttagctccgttacacaatccagcgaacattatgggtatcaagagcagcatgaaagtgttaccgggtgtgcctcaagttgccgtctttgatacagcgttccaccagaagatgccggagaaagcctatttgtacgcaatcccctatgagtactacgagaaatataaaattcgccgctatgggtttcatggaacctcacatcgttatgtgagtaaacgtgctgcggaaattatgggcaaaccgtacgatcagctcaagatcattaccgttcacgtgggtaacggcgcatcagttgcggcggtgaagaatggcgtatctgttgacacttccatgggtttcacaccacttgaaggtcttgtcatgggcacgcgcagcggcgatattgatccggccatcgtggaatttcttgagaaagaagaaggattgtcggccaaagaagtcgtcaacatcctcaacaagaaatctggtgtgcctgggctcaccaaaggctttagtagtgacatgcgtgacattgtggataatgctattgaaggtgatcctgtatgccgccttgcattagatgtgtacgaatatcgtatcgcgaaatatattggcgcatacgctgcggccatgaacggtgttgacgcgatcgtctttaccgcaggagttggcgaaaatagcccgattatgcgcgaagaaattattgagaactacttgggctacttagggatcaagatcgataaagaagccaatgacttcaaaggtgaggagaagatcatttcaacgcccgattccaaagtgattgcgatggtagttccgaccaacgaggagctcatgatcgccaaagacacgaaagaaatcattgagaaagggttggacgagcttaagatc

SEQ ID NO: 682 - protein, 417 aa, synthetic construct
  REGION 1..417: note = variant of acetate kinase from Marinitoga sp. 38H-ov
MHHHHHHGGSGMKVLVINSGSSSIKYQLLDMTNEKVLAKGLVERIGIDGSRIVHKVNGEKHVLEHEIKNHEIGLKLVLDLLTDEKYGVLKDLKEIDAVGHRVVHGGERFASSVKITDEVLKTIETLSFLAPLHNPANIMGIKSSMKVLPGVPQVAVFDTAFHQKMPEKAYLYAIPYEYYEKYKIRRYGFHGTSHRYVSKRAAEIMGKPYDQLKIITVHVGNGASVAAVKNGVSVDTSMGFTPLEGLVMGTRSGDIDPAIVEFLEKEEGLSAKEVVNILNKKSGVPGLTKGFSSDMRDIVDNAIEGDPVCRLALDVYEYRIAKYIGAYAAAMNGVDAIVFTAGVGENSPIMREEIIENYLGYLGIKIDKEANDFKGEEKIISTPDSKVIAMVVPTNEELMIAKDTKEIIEKGLDELKI

SEQ ID NO: 683 - DNA, 1251 bp, synthetic construct
  misc_feature 1..1251: note = variant of acetate kinase from Marinitoga sp. 38H-ov
  source 1..1251: mol_type = other DNA
atgcaccatcatcatcatcatggcggtagcggcatgaaagttctggtgattaattctggtagctcctccatcaaatatcagctcctcgatatgaccaacgaaaaggtattagcgaaaggcttggtcgagcgcattggcatcgacggttcgcgtatcgtgcataaagttaacggcgaaaaacacgtgctggaacatgagattaagaatcacgaaattggacttaaattggtcctggatcttcttacggacgaaaaatacggtgtgttgaaggatctcaaagaaatcgatgcagttgggcatcgcgtagtacatggcggcgagcgttttgccagtagcgtgaagattactgacgaagtcttaaagaccatcgagacgttgtcgttcttagctccgttacacaatccagcgaacattatgggtatcaagagcagcatgaaagtgttaccgggtgtgcctcaagttgccgtctttgatacagcgttccaccagaagatgccggagaaagcctatttgtacgcaatcccctatgagtactacgagaaatataaaattcgccgctatgggtttcatggaacctcacatcgttatgtgagtaaacgtgctgcggaaattatgggcaaaccgtacgatcagctcaagatcattaccgttcacgtgggtaacggcgcatcagttgcggcggtgaagaatggcgtatctgttgacacttccatgggtttcacaccacttgaaggtcttgtcatgggcacgcgcagcggcgatattgatccggccatcgtggaatttcttgagaaagaagaaggattgtcggccaaagaagtcgtcaacatcctcaacaagaaatctggtgtgtatgggctcaccaaaggctttagtagtgacatgcgtgacattgtgtggaatgctattgaaggtgatcctgtatgccgccttgcattagatgtgtacgaatatcgtatcgcgaaatatattggcgcatacgctgcggccatgaacggtgttgacgcgatcgtctttaccgcaggagttggcgaaaatagcccgattatgcgcgaagaaattattgagaactacttgggctacttagggatcaagatcgataaagaagccaatgacttcaaaggtgaggagaagatcatttcaacgcccgattccaaagtgattgcgatggtagttccgaccaacgaggagctcatgatcgccaaagacacgaaagaaatcattgagaaagggttggacgagcttaagatc

SEQ ID NO: 684 - protein, 417 aa, synthetic construct
  REGION 1..417: note = variant of acetate kinase from Marinitoga sp. 38H-ov
MHHHHHHGGSGMKVLVINSGSSSIKYQLLDMTNEKVLAKGLVERIGIDGSRIVHKVNGEKHVLEHEIKNHEIGLKLVLDLLTDEKYGVLKDLKEIDAVGHRVVHGGERFASSVKITDEVLKTIETLSFLAPLHNPANIMGIKSSMKVLPGVPQVAVFDTAFHQKMPEKAYLYAIPYEYYEKYKIRRYGFHGTSHRYVSKRAAEIMGKPYDQLKIITVHVGNGASVAAVKNGVSVDTSMGFTPLEGLVMGTRSGDIDPAIVEFLEKEEGLSAKEVVNILNKKSGVYGLTKGFSSDMRDIVWNAIEGDPVCRLALDVYEYRIAKYIGAYAAAMNGVDAIVFTAGVGENSPIMREEIIENYLGYLGIKIDKEANDFKGEEKIISTPDSKVIAMVVPTNEELMIAKDTKEIIEKGLDELKI

SEQ ID NO: 685 - DNA, 1251 bp, synthetic construct
  misc_feature 1..1251: note = variant of acetate kinase from Marinitoga sp. 38H-ov
  source 1..1251: mol_type = other DNA
atgcaccatcatcatcatcatggcggtagcggcatgaaagttctggtgattaattctggtagctcctccatcaaatatcagctcctcgatatgaccaacgaaaaggtattagcgaaaggcttggtcgagcgcattggcatcgacggttcgcgtatcgtgcataaagttaacggcgaaaaacacgtgctggaacatgagattaagaatcacgaaattggacttaaattggtcctggatcttcttacggacgaaaaatacggtgtgttgaaggatctcaaagaaatcgatgcagttgggcatcgcgtagtacatggcggcgagcgttttgccagtagcgtgaagattactgacgaagtcttaaagaccatcgagacgttgtcgttcttagctccgttacacaatccagcgaacattatgggtatcaagagcagcatgaaagtgttaccgggtgtgcctcaagttgccgtctttgatacagcgttccaccagaagatgccggagaaagcctatttgtacgcaatcccctatgagtactacgagaaatataaaattcgccgctatgggtttcatggaacctcacatcgttatgtgagtaaacgtgctgcggaaattatgggcaaaccgtacgatcagctcaagatcattaccgttcacgtgggtaacggcgcatcagttgcggcggtgaagaatggcgtatctgttgacacttccatgggtttcacaccacttgaaggtcttgtcatgggcacgcgcagcggcgatattgatccggccatcgtggaatttcttgagaaagaagaaggattgtcggccaaagaagtcgtcaacatcctcaacaagaaatctggtgtgtatgggctcaccaaaggcttttatagtgacatgcgtgacattgtggataatgctattgaaggtgatcctgtatgccgccttgcattagatgtgtacgaatatcgtatcgcgaaatatattggcgcatacgctgcggccatgaacggtgttgacgcgatcgtctttaccgcaggagttggcgaaaatagcccgattatgcgcgaagaaattattgagaactacttgggctacttagggatcaagatcgataaagaagccaatgacttcaaaggtgaggagaagatcatttcaacgcccgattccaaagtgattgcgatggtagttccgaccaacgaggagctcatgatcgccaaagacacgaaagaaatcattgagaaagggttggacgagcttaagatc

SEQ ID NO: 686 - protein, 417 aa, synthetic construct
  REGION 1..417: note = variant of acetate kinase from Marinitoga sp. 38H-ov
MHHHHHHGGSGMKVLVINSGSSSIKYQLLDMTNEKVLAKGLVERIGIDGSRIVHKVNGEKHVLEHEIKNHEIGLKLVLDLLTDEKYGVLKDLKEIDAVGHRVVHGGERFASSVKITDEVLKTIETLSFLAPLHNPANIMGIKSSMKVLPGVPQVAVFDTAFHQKMPEKAYLYAIPYEYYEKYKIRRYGFHGTSHRYVSKRAAEIMGKPYDQLKIITVHVGNGASVAAVKNGVSVDTSMGFTPLEGLVMGTRSGDIDPAIVEFLEKEEGLSAKEVVNILNKKSGVYGLTKGFYSDMRDIVDNAIEGDPVCRLALDVYEYRIAKYIGAYAAAMNGVDAIVFTAGVGENSPIMREEIIENYLGYLGIKIDKEANDFKGEEKIISTPDSKVIAMVVPTNEELMIAKDTKEIIEKGLDELKI

SEQ ID NO: 687 - DNA, 1251 bp, synthetic construct
  misc_feature 1..1251: note = variant of acetate kinase from Marinitoga sp. 38H-ov
  source 1..1251: mol_type = other DNA
atgcaccatcatcatcatcatggcggtagcggcatgaaagttctggtgattaattctggtagctcctccatcaaatatcagctcctcgatatgaccaacgaaaaggtattagcgaaaggcttggtcgagcgcattggcatcgacggttcgcgtatcgtgcataaagttaacggcgaaaaacacgtgctggaacatgagattaagaatcacgaaattggacttaaattggtcctggatcttcttacggacgaaaaatacggtgtgttgaaggatctcaaagaaatcgatgcagttgggcatcgcgtagtacatggcggcgagcgttttgccagtagcgtgaagattactgacgaagtcttaaagaccatcgagacgttgtcgttcttagctccgttacacaatccagcgaacattatgggtatcaagagcagcatgaaagtgttaccgggtgtgcctcaagttgccgtctttgatacagcgttccaccagaagatgccggagaaagcctatttgtacgcaatcccctatgagtactacgagaaatataaaattcgccgctatgggtttcatggaacctcacatcgttatgtgagtaaacgtgctgcggaaattatgggcaaaccgtacgatcagctcaagatcattaccgttcacgtgggtaacggcgcatcagttgcggcggtgaagaatggcgtatctgttgacacttccatgggtttcacaccacttgaaggtcttgtcatgggcacgcgcagcggcgatattgatccggccatcgtggaatttcttgagaaagaagaaggattgtcggccaaagaagtcgtcaacatcctcaacaagaaatctggtgtgcgggggctcaccaaaggctttagtagtgacatgcgtgacattgtggataatgctattgaaggtgatcctgtatgccgccttgcattagatgtgtacgaatatcgtatcgcgaaatatattggcgcatacgctgcggccatgaacggtgttgacgcgatcgtctttaccgcaggagttggcgaaaatagcccgattatgcgcgaagaaattattgagaactacttgggctacttagggatcaagatcgataaagaagccaatgacttcaaaggtgaggagaagatcatttcaacgcccgattccaaagtgattgcgatggtagttccgaccaacgaggagctcatgatcgccaaagacacgaaagaaatcattgagaaagggttggacgagcttaagatc

SEQ ID NO: 688 - protein, 417 aa, synthetic construct
  REGION 1..417: note = variant of acetate kinase from Marinitoga sp. 38H-ov
MHHHHHHGGSGMKVLVINSGSSSIKYQLLDMTNEKVLAKGLVERIGIDGSRIVHKVNGEKHVLEHEIKNHEIGLKLVLDLLTDEKYGVLKDLKEIDAVGHRVVHGGERFASSVKITDEVLKTIETLSFLAPLHNPANIMGIKSSMKVLPGVPQVAVFDTAFHQKMPEKAYLYAIPYEYYEKYKIRRYGFHGTSHRYVSKRAAEIMGKPYDQLKIITVHVGNGASVAAVKNGVSVDTSMGFTPLEGLVMGTRSGDIDPAIVEFLEKEEGLSAKEVVNILNKKSGVRGLTKGFSSDMRDIVDNAIEGDPVCRLALDVYEYRIAKYIGAYAAAMNGVDAIVFTAGVGENSPIMREEIIENYLGYLGIKIDKEANDFKGEEKIISTPDSKVIAMVVPTNEELMIAKDTKEIIEKGLDELKI

SEQ ID NO: 689 - DNA, 1251 bp, synthetic construct
  misc_feature 1..1251: note = variant of acetate kinase from Marinitoga sp. 38H-ov
  source 1..1251: mol_type = other DNA
atgcaccatcatcatcatcatggcggtagcggcatgaaagttctggtgattaattctggtagctcctccatcaaatatcagctcctcgatatgaccaacgaaaaggtattagcgaaaggcttggtcgagcgcattggcatcgacggttcgcgtatcgtgcataaagttaacggcgaaaaacacgtgctggaacatgagattaagaatcacgaaattggacttaaattggtcctggatcttcttacggacgaaaaatacggtgtgttgaaggatctcaaagaaatcgatgcagttgggcatcgcgtagtacatggcggcgagcgttttgccagtagcgtgaagattactgacgaagtcttaaagaccatcgagacgttgtcgttcttagctccgttacacaatccagcgaacattatgggtatcaagagcagcatgaaagtgttaccgggtgtgcctcaagttgccgtctttgatacagcgttccaccagaagatgccggagaaagcctatttgtacgcaatcccctatgagtactacgagaaatataaaattcgccgctatgggtttcatggaacctcacatcgttatgtgagtaaacgtgctgcggaaattatgggcaaaccgtacgatcagctcaagatcattaccgttcacgtgggtaacggcgcatcagttgcggcggtgaagaatggcgtatctgttgacacttccatgggtttcacaccacttgaaggtcttgtcatgggcacgcgcagcggcgatattgatccggccatcgtggaatttcttgagaaagaagaaggattgtcggccaaagaagtcgtcaacatcctcaacaagaaatctggtgtgtatgggctcaccaaaggctttagtagtgacatgcgtgacattgtggataatgctattgaaggtgatcctgtatgccgccttgcattagatgtgtacgaatatcgtatcgcgaaatatattggcgcatacgctgcggccatgaacggtgttgacgcgatcgtctttaccgcaggagttggcgaaaatagcccgattatgcgctatgaaattattgagaactacttgggctacttagggatcaagatcgataaagaagccaatgacttcaaaggtgaggagaagatcatttcaacgcccgattccaaagtgattgcgatggtagttccgaccaacgaggagctcatgatcgccaaagacacgaaagaaatcattgagaaagggttggacgagcttaagatc

SEQ ID NO: 690 - protein, 417 aa, synthetic construct
  REGION 1..417: note = variant of acetate kinase from Marinitoga sp. 38H-ov
MHHHHHHGGSGMKVLVINSGSSSIKYQLLDMTNEKVLAKGLVERIGIDGSRIVHKVNGEKHVLEHEIKNHEIGLKLVLDLLTDEKYGVLKDLKEIDAVGHRVVHGGERFASSVKITDEVLKTIETLSFLAPLHNPANIMGIKSSMKVLPGVPQVAVFDTAFHQKMPEKAYLYAIPYEYYEKYKIRRYGFHGTSHRYVSKRAAEIMGKPYDQLKIITVHVGNGASVAAVKNGVSVDTSMGFTPLEGLVMGTRSGDIDPAIVEFLEKEEGLSAKEVVNILNKKSGVYGLTKGFSSDMRDIVDNAIEGDPVCRLALDVYEYRIAKYIGAYAAAMNGVDAIVFTAGVGENSPIMRYEIIENYLGYLGIKIDKEANDFKGEEKIISTPDSKVIAMVVPTNEELMIAKDTKEIIEKGLDELKI

SEQ ID NO: 691 - DNA, 1251 bp, synthetic construct
  misc_feature 1..1251: note = variant of acetate kinase from Marinitoga sp. 38H-ov
  source 1..1251: mol_type = other DNA
atgcaccatcatcatcatcatggcggtagcggcatgaaagttctggtgattaattctggtagctcctccatcaaatatcagctcctcgatatgaccaacgaaaaggtattagcgaaaggcttggtcgagcgcattggcatcgacggttcgcgtatcgtgcataaagttaacggcgaaaaacacgtgctggaacatgagattaagaatcacgaaattggacttaaattggtcctggatcttcttacggacgaaaaatacggtgtgttgaaggatctcaaagaaatcgatgcagttgggcatcgcgtagtacatggcggcgagcgttttgccagtagcgtgaagattactgacgaagtcttaaagaccatcgagacgttgtcgttcttagctccgttacacaatccagcgaacattatgggtatcaagagcagcatgaaagtgttaccgggtgtgcctcaagttgccgtctttgatacagcgttccaccagaagatgccggagaaagcctatttgtacgcaatcccctatgagtactacgagaaatataaaattcgccgctatgggtttcatggaacctcacatcgttatgtgagtaaacgtgctgcggaaattatgggcaaaccgtacgatcagctcaagatcattaccgttcacgtgggtaacggcgcatcagttgcggcggtgaagaatggcgtatctgttgacacttccatgggtttcacaccacttgaaggtcttgtcatgggcacgcgcagcggcgatattgatccggccatcgtggaatttcttgagaaagaagaaggattgtcggccaaagaagtcgtcaacatcctcaacaagaaatctggtgtgtatgggctcaccaaaggctttagtagtgacatgcgtgacattgtggataatgctattgaaggtgatcctgtatgccgccttgcattagatgtgtacgaatatcgtatcgcgaaatatattggcgcatacgctgcggccatgaacggtgttgacgcgatcgtctttaccgcaggagttggcgaaaatagcccgattatgcgcgaagaaattattgagaactacttgggctacttagggatcaagatcgataaagaagccaatgacttccggggtgaggagaagatcatttcaacgcccgattccaaagtgattgcgatggtagttccgaccaacgaggagctcatgatcgccaaagacacgaaagaaatcattgagaaagggttggacgagcttaagatc

SEQ ID NO: 692 - protein, 417 aa, synthetic construct
  REGION 1..417: note = variant of acetate kinase from Marinitoga sp. 38H-ov
MHHHHHHGGSGMKVLVINSGSSSIKYQLLDMTNEKVLAKGLVERIGIDGSRIVHKVNGEKHVLEHEIKNHEIGLKLVLDLLTDEKYGVLKDLKEIDAVGHRVVHGGERFASSVKITDEVLKTIETLSFLAPLHNPANIMGIKSSMKVLPGVPQVAVFDTAFHQKMPEKAYLYAIPYEYYEKYKIRRYGFHGTSHRYVSKRAAEIMGKPYDQLKIITVHVGNGASVAAVKNGVSVDTSMGFTPLEGLVMGTRSGDIDPAIVEFLEKEEGLSAKEVVNILNKKSGVYGLTKGFSSDMRDIVDNAIEGDPVCRLALDVYEYRIAKYIGAYAAAMNGVDAIVFTAGVGENSPIMREEIIENYLGYLGIKIDKEANDFRGEEKIISTPDSKVIAMVVPTNEELMIAKDTKEIIEKGLDELKI

SEQ ID NO: 693 - DNA, 1251 bp, synthetic construct
  misc_feature 1..1251: note = variant of acetate kinase from Marinitoga sp. 38H-ov
  source 1..1251: mol_type = other DNA
atgcaccatcatcatcatcatggcggtagcggcatgaaagttctggtgattaattctggtagctcctccatcaaatatcagctcctcgatatgaccaacgaaaaggtattagcgaaaggcttggtcgagcgcattggcatcgacggttcgcgtatcgtgcataaagttaacggcgaaaaacacgtgctggaacatgagattaagaatcacgaaattggacttaaattggtcctggatcttcttacggacgaaaaatacggtgtgttgaaggatctcaaagaaatcgatgcagttgggcatcgcgtagtacatggcggcgagcgttttgccagtagcgtgaagattactgacgaagtcttaaagaccatcgagacgttgtcgttcttagctccgttacacaatccagcgaacattatgggtatcaagagcagcatgaaagtgttaccgggtgtgcctcaagttgccgtctttgatacagcgttccaccagaagatgccggagaaagcctatttgtacgcaatcccctatgagtactacgagaaatataaaattcgccgctatgggtttcatggaacctcacatcgttatgtgagtaaacgtgctgcggaaattatgggcaaaccgtacgatcagctcaagatcattaccgttcacgtgggtaacggcgcatcagttgcggcggtgaagaatggcgtatctgttgacacttccatgggtttcacaccacttgaaggtcttgtcatgggcacgcgcagcggcgatattgatccggccatcgtggaatttcttgagaaagaagaaggattgtcggccaaagaagtcgtcaacatcctcaacaagaaatctggtgtgtatgggctcaccaaaggctttagtagtgacatgcgtgacattgtggataatgctattgaaggtgatcctgtatgccgccttgcattagatgtgtacgaatatcgtatcgcgaaatatattggcgcatacgctgcggccatgaacggtgttgacgcgatcgtctttaccgcaggagttggcgaaaatagcccgattatgcgcgaagaactgattgagaactacttgggctacttagggatcaagatcgataaagaagccaatgacttcaaaggtgaggagaagatcatttcaacgcccgattccaaagtgattgcgatggtagttccgaccaacgaggagctcatgatcgccaaagacacgaaagaaatcattgagaaagggttggacgagcttaagatc

SEQ ID NO: 694 - protein, 417 aa, synthetic construct
  REGION 1..417: note = variant of acetate kinase from Marinitoga sp. 38H-ov
MHHHHHHGGSGMKVLVINSGSSSIKYQLLDMTNEKVLAKGLVERIGIDGSRIVHKVNGEKHVLEHEIKNHEIGLKLVLDLLTDEKYGVLKDLKEIDAVGHRVVHGGERFASSVKITDEVLKTIETLSFLAPLHNPANIMGIKSSMKVLPGVPQVAVFDTAFHQKMPEKAYLYAIPYEYYEKYKIRRYGFHGTSHRYVSKRAAEIMGKPYDQLKIITVHVGNGASVAAVKNGVSVDTSMGFTPLEGLVMGTRSGDIDPAIVEFLEKEEGLSAKEVVNILNKKSGVYGLTKGFSSDMRDIVDNAIEGDPVCRLALDVYEYRIAKYIGAYAAAMNGVDAIVFTAGVGENSPIMREELIENYLGYLGIKIDKEANDFKGEEKIISTPDSKVIAMVVPTNEELMIAKDTKEIIEKGLDELKI

SEQ ID NO: 695 - DNA, 1251 bp, synthetic construct
  misc_feature 1..1251: note = variant of acetate kinase from Marinitoga sp. 38H-ov
  source 1..1251: mol_type = other DNA
atgcaccatcatcatcatcatggcggtagcggcatgaaagttctggtgattaattctggtagctcctccatcaaatatcagctcctcgatatgaccaacgaaaaggtattagcgaaaggcttggtcgagcgcattggcatcgacggttcgcgtatcgtgcataaagttaacggcgaaaaacacgtgctggaacatgagattaagaatcacgaaattggacttaaattggtcctggatcttcttacggacgaaaaatacggtgtgttgaaggatctcaaagaaatcgatgcagttgggcatcgcgtagtacatggcggcgagcgttttgccagtagcgtgaagattactgacgaagtcttaaagaccatcgagacgttgtcgttcttagctccgttagggaatccagcgaacattatgggtatcaagagcagcatgaaagtgttaccgggtgtgcctcaagttgccgtctttgatacagcgttccaccagaagatgccggagaaagcctatttgtacgcaatcccctatgagtactacgagaaatataaaattcgccgctatgggtttcatggaacctcacatcgttatgtgagtaaacgtgctgcggaaattatgggcaaaccgtacgatcagctcaagatcattaccgttcacgtgggtaacggcgcatcagttgcggcggtgaagaatggcgtatctgttgacacttccatgggtttcacaccacttgaaggtcttgtcatgggcacgcgcagcggcgatattgatccggccatcgtggaatttcttgagaaagaagaaggattgtcggccaaagaagtcgtcaacatcctcaacaagaaatctggtgtgtatgggctcaccaaaggctttagtagtgacatgcgtgacattgtggataatgctattgaaggtgatcctgtatgccgccttgcattagatgtgtacgaatatcgtatcgcgaaatatattggcgcatacgctgcggccatgaacggtgttgacgcgatcgtctttaccgcaggagttggcgaaaatagcccgattatgcgcgaagaaattattgagaactacttgggctacttagggatcaagatcgataaagaagccaatgacttcaaaggtgaggagaagatcatttcaacgcccgattccaaagtgattgcgatggtagttccgaccaacgaggagctcatgatcgccaaagacacgaaagaaatcattgagaaagggttggacgagcttaagatc

SEQ ID NO: 696 - protein, 417 aa, synthetic construct
  REGION 1..417: note = variant of acetate kinase from Marinitoga sp. 38H-ov
MHHHHHHGGSGMKVLVINSGSSSIKYQLLDMTNEKVLAKGLVERIGIDGSRIVHKVNGEKHVLEHEIKNHEIGLKLVLDLLTDEKYGVLKDLKEIDAVGHRVVHGGERFASSVKITDEVLKTIETLSFLAPLGNPANIMGIKSSMKVLPGVPQVAVFDTAFHQKMPEKAYLYAIPYEYYEKYKIRRYGFHGTSHRYVSKRAAEIMGKPYDQLKIITVHVGNGASVAAVKNGVSVDTSMGFTPLEGLVMGTRSGDIDPAIVEFLEKEEGLSAKEVVNILNKKSGVYGLTKGFSSDMRDIVDNAIEGDPVCRLALDVYEYRIAKYIGAYAAAMNGVDAIVFTAGVGENSPIMREEIIENYLGYLGIKIDKEANDFKGEEKIISTPDSKVIAMVVPTNEELMIAKDTKEIIEKGLDELKI

SEQ ID NO: 697 - DNA, 1251 bp, synthetic construct
  misc_feature 1..1251: note = variant of acetate kinase from Marinitoga sp. 38H-ov
  source 1..1251: mol_type = other DNA
atgcaccatcatcatcatcatggcggtagcggcatgaaagttctggtgattaattctggtagctcctccatcaaatatcagctcctcgatatgaccaacgaaaaggtattagcgaaaggcttggtcgagcgcattggcatcgacggttcgcgtatcgtgcataaagttaacggcgaaaaacacgtgctggaacatgagattaagaatcacgaaattggacttaaattggtcctggatcttcttacggacgaaaaatacggtgtgttgaaggatctcaaagaaatcgatgcagttgggcatcgcgtagtacatggcggcgagcgttttgccagtagcgtgaagattactgacgaagtcttaaagaccatcgagacgttgtcgttcttagctccgttacacaatccagcgaacattatgggtatcaagagcagcatgaaagtgttaccgggtgtgcctcaagttgccgtctttgatacagcgttccaccagaagatgccggagaaagcctatttgtacgcaatcccctatgagtactacgagaaatataaaattcgccgctatgggtttcatggaacctcacatcgttatgtgagtaaacgtgctgcggaaattatgggcaaaccgtacgatcagctcaagatcattaccgttcacgtgggtaacggcgcatcagttgcggcggtgaagaatggcgtatctgttgacacttccatgggtttcacaccacttgaaggtcttgtcatgggcacgcgcagcggcgatattgatccggccatcgtggaatttcttgagaaagaagaaggattgtcggccaaagaagtcgtcaacatcctcaacaagaaatctggtgtgtatgggctcaccaaaggctttagtatggacatgcgtgacattgtggataatgctattgaaggtgatcctgtatgccgccttgcattagatgtgtacgaatatcgtatcgcgaaatatattggcgcatacgctgcggccatgaacggtgttgacgcgatcgtctttaccgcaggagttggcgaaaatagcccgattatgcgcgaagaaattattgagaactacttgggctacttagggatcaagatcgataaagaagccaatgacttcaaaggtgaggagaagatcatttcaacgcccgattccaaagtgattgcgatggtagttccgaccaacgaggagctcatgatcgccaaagacacgaaagaaatcattgagaaagggttggacgagcttaagatc

SEQ ID NO: 698 - protein, 417 aa, synthetic construct
  REGION 1..417: note = variant of acetate kinase from Marinitoga sp. 38H-ov
MHHHHHHGGSGMKVLVINSGSSSIKYQLLDMTNEKVLAKGLVERIGIDGSRIVHKVNGEKHVLEHEIKNHEIGLKLVLDLLTDEKYGVLKDLKEIDAVGHRVVHGGERFASSVKITDEVLKTIETLSFLAPLHNPANIMGIKSSMKVLPGVPQVAVFDTAFHQKMPEKAYLYAIPYEYYEKYKIRRYGFHGTSHRYVSKRAAEIMGKPYDQLKIITVHVGNGASVAAVKNGVSVDTSMGFTPLEGLVMGTRSGDIDPAIVEFLEKEEGLSAKEVVNILNKKSGVYGLTKGFSMDMRDIVDNAIEGDPVCRLALDVYEYRIAKYIGAYAAAMNGVDAIVFTAGVGENSPIMREEIIENYLGYLGIKIDKEANDFKGEEKIISTPDSKVIAMVVPTNEELMIAKDTKEIIEKGLDELKI

SEQ ID NO: 699 - DNA, 1251 bp, synthetic construct
  misc_feature 1..1251: note = variant of acetate kinase from Marinitoga sp. 38H-ov
  source 1..1251: mol_type = other DNA
atgcaccatcatcatcatcatggcggtagcggcatgaaagttctggtgattaattctggtagctcctccatcaaatatcagctcctcgatatgaccaacgaaaaggtattagcgaaaggcttggtcgagcgcattggcatcgacggttcgcgtatcgtgcataaagttaacggcgaaaaacacgtgctggaacatgagattaagaatcacgaaattggacttaaattggtcctggatcttcttacggacgaaaaatacggtgtgttgaaggatctcaaagaaatcgatgcagttgggcatcgcgtagtacatggcggcgagcgttttgccagtagcgtgaagattactgacgaagtcttaaagaccatcgagacgttgtcgttcttagctccgttacacaatccagcgaacattatgggtatcaagagcagcatgaaagtgttaccgggtgtgcctcaagttgccgtctttgatacagcgttccaccagaagatgccggagaaagcctatttgtacgcaatcccctatgagtactacgagaaatataaaattcgccgctatgggtttcatggaacctcacatcgttatgtgagtaaacgtgctgcggaaattatgggcaaaccgtacgatcagctcaagatcattaccgttcacgtgggtaacggcgcatcagttgcggcggtgaagaatggcgtatctgttgacacttccatgggtttcacaccacttgaaggtcttgtcatgggcacgcgcagcggcgatattgatccggccatcgtggaatttcttgagaaagaagaaggattgtcggccaaagaagtcgtcaacatcctcaacaagaaatctggtgtgtatgggctcttgaaaggctttagtagtgacatgcgtgacattgtggataatgctattgaaggtgatcctgtatgccgccttgcattagatgtgtacgaatatcgtatcgcgaaatatattggcgcatacgctgcggccatgaacggtgttgacgcgatcgtctttaccgcaggagttggcgaaaatagcccgattatgcgcgaagaaattattgagaactacttgggctacttagggatcaagatcgataaagaagccaatgacttcaaaggtgaggagaagatcatttcaacgcccgattccaaagtgattgcgatggtagttccgaccaacgaggagctcatgatcgccaaagacacgaaagaaatcattgagaaagggttggacgagcttaagatc

SEQ ID NO: 700 - protein, 417 aa, synthetic construct
  REGION 1..417: note = variant of acetate kinase from Marinitoga sp. 38H-ov
MHHHHHHGGSGMKVLVINSGSSSIKYQLLDMTNEKVLAKGLVERIGIDGSRIVHKVNGEKHVLEHEIKNHEIGLKLVLDLLTDEKYGVLKDLKEIDAVGHRVVHGGERFASSVKITDEVLKTIETLSFLAPLHNPANIMGIKSSMKVLPGVPQVAVFDTAFHQKMPEKAYLYAIPYEYYEKYKIRRYGFHGTSHRYVSKRAAEIMGKPYDQLKIITVHVGNGASVAAVKNGVSVDTSMGFTPLEGLVMGTRSGDIDPAIVEFLEKEEGLSAKEVVNILNKKSGVYGLLKGFSSDMRDIVDNAIEGDPVCRLALDVYEYRIAKYIGAYAAAMNGVDAIVFTAGVGENSPIMREEIIENYLGYLGIKIDKEANDFKGEEKIISTPDSKVIAMVVPTNEELMIAKDTKEIIEKGLDELKI

SEQ ID NO: 701 - DNA, 1251 bp, synthetic construct
  misc_feature 1..1251: note = variant of acetate kinase from Marinitoga sp. 38H-ov
  source 1..1251: mol_type = other DNA
atgcaccatcatcatcatcatggcggtagcggcatgaaagttctggtgattaattctggtagctcctccatcaaatatcagctcctcgatatgaccaacgaaaaggtattagcgaaaggcttggtcgagcgcattggcatcgacggttcgcgtatcgtgcataaagttaacggcgaaaaacacgtgctggaacatgagattaagaatcacgaaattggacttaaattggtcctggatcttcttacggacgaaaaatacggtgtgttgaaggatctcaaagaaatcgatgcagttgggcatcgcgtagtacatggcggcgagcgttttgccagtagcgtgaagattactgacgaagtcttaaagaccatcgagacgttgtcgttcttagctccgttacacaatccagcgaacattatgggtatcaagagcagcatgaaagtgttaccgggtgtgcctcaagttgccgtctttgatacagcgttccaccagaagatgccggagaaagcctatttgtacgcaatcccctatgagtactacgagaaatataaaattcgccgctatgggtttcatggaacctcacatcgttatgtgagtaaacgtgctgcggaaattatgggcaaaccgtacgatcagctcaagatcattaccgttcacgtgggtaacggcgcatcagttgcggcggtgaagaatggcgtatctgttgacacttccatgggtttcacaccacttgaaggtcttgtcatgggcacgcgcagcggcgatattgatccggccatcgtggaatttcttgagaaagaagaaggattgtcggccaaagaagtcgtcaacatcctcaacaagaaatctggtgtgtatgggctcaccaaaggctttagtagtgacatgcgtgacattgtggataatgctattgaaggtgatcctgtatttcgccttgcattagatgtgtacgaatatcgtatcgcgaaatatattggcgcatacgctgcggccatgaacggtgttgacgcgatcgtctttaccgcaggagttggcgaaaatagcccgattatgcgcgaagaaattattgagaactacttgggctacttagggatcaagatcgataaagaagccaatgacttcaaaggtgaggagaagatcatttcaacgcccgattccaaagtgattgcgatggtagttccgaccaacgaggagctcatgatcgccaaagacacgaaagaaatcattgagaaagggttggacgagcttaagatc

SEQ ID NO: 702 - protein, 417 aa, synthetic construct
  REGION 1..417: note = variant of acetate kinase from Marinitoga sp. 38H-ov
MHHHHHHGGSGMKVLVINSGSSSIKYQLLDMTNEKVLAKGLVERIGIDGSRIVHKVNGEKHVLEHEIKNHEIGLKLVLDLLTDEKYGVLKDLKEIDAVGHRVVHGGERFASSVKITDEVLKTIETLSFLAPLHNPANIMGIKSSMKVLPGVPQVAVFDTAFHQKMPEKAYLYAIPYEYYEKYKIRRYGFHGTSHRYVSKRAAEIMGKPYDQLKIITVHVGNGASVAAVKNGVSVDTSMGFTPLEGLVMGTRSGDIDPAIVEFLEKEEGLSAKEVVNILNKKSGVYGLTKGFSSDMRDIVDNAIEGDPVFRLALDVYEYRIAKYIGAYAAAMNGVDAIVFTAGVGENSPIMREEIIENYLGYLGIKIDKEANDFKGEEKIISTPDSKVIAMVVPTNEELMIAKDTKEIIEKGLDELKI

SEQ ID NO: 703 - DNA, 1251 bp, synthetic construct
  misc_feature 1..1251: note = variant of acetate kinase from Marinitoga sp. 38H-ov
  source 1..1251: mol_type = other DNA
atgcaccatcatcatcatcatggcggtagcggcatgaaagttctggtgattaattctggtagctcctccatcaaatatcagctcctcgatatgaccaacgaaaaggtattagcgaaaggcttggtcgagcgcattggcatcgacggttcgcgtatcgtgcataaagttaacggcgaaaaacacgtgctggaacatgagattaagaatcacgaaattggacttaaattggtcctggatcttcttacggacgaaaaatacggtgtgttgaaggatctcaaagaaatcgatgcagttgggcatcgcgtagtacatggcggcgagcgttttgccagtagcgtgaagattactgacgaagtcttaaagaccatcgagacgttgtcgttcttagctccgttacacaatccagcgaacattatgggtatcaagagcagcatgaaagtgttaccgggtgtgcctcaagttgccgtctttgatacagcgttccaccagaagatgccggagaaagcctatttgtacgcaatcccctatgagtactacgagaaatataaaattcgccgctatgggtttcatggaacctcacatcgttatgtgagtaaacgtgctgcggaaattatgggcaaaccgtacgatcagctcaagatcattaccgttcacgtgggtaacggcgcatcagttgcggcggtgaagaatggcgtatctgttgacacttccatgggtttcacaccacttgaaggtcttgtcatgggcacgcgcagcggcgatattgatccggccatcgtggaatttcttgagaaagaagaaggattgtcggccaaagaagtcgtcaacatcctcaacaagaaatctggtgtgtatgggctcaccaaaggctttagtagtgacatgcgtgacattgtggataatgctattgaaggtgatcctgtatgccgccttgcattagatgtgtaccagtatcgtatcgcgaaatatattggcgcatacgctgcggccatgaacggtgttgacgcgatcgtctttaccgcaggagttggcgaaaatagcccgattatgcgcgaagaaattattgagaactacttgggctacttagggatcaagatcgataaagaagccaatgacttcaaaggtgaggagaagatcatttcaacgcccgattccaaagtgattgcgatggtagttccgaccaacgaggagctcatgatcgccaaagacacgaaagaaatcattgagaaagggttggacgagcttaagatc

SEQ ID NO: 704 - protein, 417 aa, synthetic construct
  REGION 1..417: note = variant of acetate kinase from Marinitoga sp. 38H-ov
MHHHHHHGGSGMKVLVINSGSSSIKYQLLDMTNEKVLAKGLVERIGIDGSRIVHKVNGEKHVLEHEIKNHEIGLKLVLDLLTDEKYGVLKDLKEIDAVGHRVVHGGERFASSVKITDEVLKTIETLSFLAPLHNPANIMGIKSSMKVLPGVPQVAVFDTAFHQKMPEKAYLYAIPYEYYEKYKIRRYGFHGTSHRYVSKRAAEIMGKPYDQLKIITVHVGNGASVAAVKNGVSVDTSMGFTPLEGLVMGTRSGDIDPAIVEFLEKEEGLSAKEVVNILNKKSGVYGLTKGFSSDMRDIVDNAIEGDPVCRLALDVYQYRIAKYIGAYAAAMNGVDAIVFTAGVGENSPIMREEIIENYLGYLGIKIDKEANDFKGEEKIISTPDSKVIAMVVPTNEELMIAKDTKEIIEKGLDELKI

SEQ ID NO: 705 - DNA, 1251 bp, synthetic construct
  misc_feature 1..1251: note = variant of acetate kinase from Marinitoga sp. 38H-ov
  source 1..1251: mol_type = other DNA
atgcaccatcatcatcatcatggcggtagcggcatgaaagttctggtgattaattctggtagctcctccatcaaatatcagctcctcgatatgaccaacgaaaaggtattagcgaaaggcttggtcgagcgcattggcatcgacggttcgcgtatcgtgcataaagttaacggcgaaaaacacgtgctggaacatgagattaagaatcacgaaattggacttaaattggtcctggatcttcttacggacgaaaaatacggtgtgttgaaggatctcaaagaaatcgatgcagttgggcatcgcgtagtacatggcggcgagcgttttgccagtagcgtgaagattactgacgaagtcttaaagaccatcgagacgttgtcgttcttagctccgttacacaatccagcgaacattatgggtatcaagagcagcatgaaagtgttaccgggtgtgcctcaagttgccgtctttgatacagcgttccaccagaagatgccggagaaagcctatttgtacgcaatcccctatgagtactacgagaaatataaaattcgccgctatgggtttcagggaacctcacatcgttatgtgagtaaacgtgctgcggaaattatgggcaaaccgtacgatcagctcaagatcattaccgttcacgtgggtaacggcgcatcagttgcggcggtgaagaatggcgtatctgttgacacttccatgggtttcacaccacttgaaggtcttgtcatgggcacgcgcagcggcgatattgatccggccatcgtggaatttcttgagaaagaagaaggattgtcggccaaagaagtcgtcaacatcctcaacaagaaatctggtgtgtatgggctcaccaaaggctttagtagtgacatgcgtgacattgtggataatgctattgaaggtgatcctgtatgccgccttgcattagatgtgtacgaatatcgtatcgcgaaatatattggcgcatacgctgcggccatgaacggtgttgacgcgatcgtctttaccgcaggagttggcgaaaatagcccgattatgcgcgaagaaattattgagaactacttgggctacttagggatcaagatcgataaagaagccaatgacttcaaaggtgaggagaagatcatttcaacgcccgattccaaagtgattgcgatggtagttccgaccaacgaggagctcatgatcgccaaagacacgaaagaaatcattgagaaagggttggacgagcttaagatc

SEQ ID NO: 706 - protein, 417 aa, synthetic construct
  REGION 1..417: note = variant of acetate kinase from Marinitoga sp. 38H-ov
MHHHHHHGGSGMKVLVINSGSSSIKYQLLDMTNEKVLAKGLVERIGIDGSRIVHKVNGEKHVLEHEIKNHEIGLKLVLDLLTDEKYGVLKDLKEIDAVGHRVVHGGERFASSVKITDEVLKTIETLSFLAPLHNPANIMGIKSSMKVLPGVPQVAVFDTAFHQKMPEKAYLYAIPYEYYEKYKIRRYGFQGTSHRYVSKRAAEIMGKPYDQLKIITVHVGNGASVAAVKNGVSVDTSMGFTPLEGLVMGTRSGDIDPAIVEFLEKEEGLSAKEVVNILNKKSGVYGLTKGFSSDMRDIVDNAIEGDPVCRLALDVYEYRIAKYIGAYAAAMNGVDAIVFTAGVGENSPIMREEIIENYLGYLGIKIDKEANDFKGEEKIISTPDSKVIAMVVPTNEELMIAKDTKEIIEKGLDELKI

SEQ ID NO: 707 - DNA, 1251 bp, synthetic construct
  misc_feature 1..1251: note = variant of acetate kinase from Marinitoga sp. 38H-ov
  source 1..1251: mol_type = other DNA
atgcaccatcatcatcatcatggcggtagcggcatgaaagttctggtgattaattctggtagctcctccatcaaatatcagctcctcgatatgaccaacgaaaaggtattagcgaaaggcttggtcgagcgcattggcatcgacggttcgcgtatcgtgcataaagttaacggcgaaaaacacgtgctggaacatgagattaagaatcacgaaattggacttaaattggtcctggatcttcttacggacgaaaaatacggtgtgttgaaggatctcaaagaaatcgatgcagttgggcatcgcgtagtacatggcggcgagcgttttgccagtagcgtgaagattactgacgaagtcttaaagaccatcgagacgttgtcgttcttagctccgttacacaatccagcgaacattatgggtatcaagagcagcatgaaagtgttaccgggtgtgcctcaagttgccgtctttgatacagcgttccaccagaagatgccggagaaagcctatttgtacgcaatcccctatgagtactacgagaaatataaaattcgccgctatgggtttcatggaacctcacatcgttatgtgagtaaacgtgctgcggaaattatgggcaaaccgtacgatcagctcaagatcattaccgttcacgtgggtaacggcgcatcagttgcggcggtgaagaatggcgtatctgttgacacttccatgggtttcacaccacttgaaggtcttgtcatgggcacgcgcagcggcgatattgatccggccatcgtggaatttcttgagaaagaagaaggattgtcggccaaagaagtcgtcaacatcctcaacaagaaatctggtgtgtatgggctcaccaaaggctttagtagtgacatgcgtgacattgtggataatgctattgaaggtgatcctgtatgccgccttgcattagatgtgtacgaatatcgtatcgcgaaatatattggcgcatacgctgcggccatgaacggtgttgacgcgatcgtctttaccgcaggagttggcgaaaatagcccgattatgcgcgaagaaattattgagaactacttgggctacttagggatcaagatcgataaagaagccaatgacttcaaaggtgaggagaagatcatttcaacgcccgattccaaagtgattgcgatgccggttccgaccaacgaggagctcatgatcgccaaagacacgaaagaaatcattgagaaagggttggacgagcttaagatc

SEQ ID NO: 708 - protein, 417 aa, synthetic construct
  REGION 1..417: note = variant of acetate kinase from Marinitoga sp. 38H-ov
MHHHHHHGGSGMKVLVINSGSSSIKYQLLDMTNEKVLAKGLVERIGIDGSRIVHKVNGEKHVLEHEIKNHEIGLKLVLDLLTDEKYGVLKDLKEIDAVGHRVVHGGERFASSVKITDEVLKTIETLSFLAPLHNPANIMGIKSSMKVLPGVPQVAVFDTAFHQKMPEKAYLYAIPYEYYEKYKIRRYGFHGTSHRYVSKRAAEIMGKPYDQLKIITVHVGNGASVAAVKNGVSVDTSMGFTPLEGLVMGTRSGDIDPAIVEFLEKEEGLSAKEVVNILNKKSGVYGLTKGFSSDMRDIVDNAIEGDPVCRLALDVYEYRIAKYIGAYAAAMNGVDAIVFTAGVGENSPIMREEIIENYLGYLGIKIDKEANDFKGEEKIISTPDSKVIAMPVPTNEELMIAKDTKEIIEKGLDELKI

SEQ ID NO: 709 - DNA, 1251 bp, synthetic construct
  misc_feature 1..1251: note = variant of acetate kinase from Marinitoga sp. 38H-ov
  source 1..1251: mol_type = other DNA
atgcaccatcatcatcatcatggcggtagcggcatgaaagttctggtgattaattctggtagctcctccatcaaatatcagctcctcgatatgaccaacgaaaaggtattagcgaaaggcttggtcgagcgcattggcatcgacggttcgcgtatcgtgcataaagttaacggcgaaaaacacgtgctggaacatgagattaagaatcacgaaattggacttaaattggtcctggatcttcttacggacgaaaaatacggtgtgttgaaggatctcaaagaaatcgatgcagttgggcatcgcgtagtacatggcggcgagcgttttgccagtagcgtgaagattactgacgaagtcttaaagaccatcgagacgttgtcgttcttagctccgttacacaatccagcgaacattatgggtatcaagagcagcatgaaagtgttaccgggtgtgcctcaagttgccgtctttgatacagcgttccaccagaagatgccggagaaagcctatttgtacgcaatcccctatgagtactacgagaaatataaaattcgccgctatgggtttcatggaacctcacatcgttatgtgagtaaacgtgctgcggaaattatgggcaaaccgtacgatcagctcaagatcattaccgttcacgtgggtaacggcgcatcagttgcggcggtgaagaatggcgtatctgttgacacttccatgggtttcacaccacttgaaggtcttgtcatgggcacgcgcagcggcgatattgatccggccatcgtggaatttcttgagaaagaagaaggattgtcggccaaagaagtcgtcaacatcctcaacaagaaatctggtgtgtatgggctcaccaaaggctttagtagtgacatgcgtgacattgtggataatgctattattggtgatcctgtatgccgccttgcattagatgtgtacgaatatcgtatcgcgaaatatattggcgcatacgctgcggccatgaacggtgttgacgcgatcgtctttaccgcaggagttggcgaaaatagcccgattatgcgcgaagaaattattgagaactacttgggctacttagggatcaagatcgataaagaagccaatgacttcaaaggtgaggagaagatcatttcaacgcccgattccaaagtgattgcgatggtagttccgaccaacgaggagctcatgatcgccaaagacacgaaagaaatcattgagaaagggttggacgagcttaagatc

SEQ ID NO: 710 - protein, 417 aa, synthetic construct
  REGION 1..417: note = variant of acetate kinase from Marinitoga sp. 38H-ov
MHHHHHHGGSGMKVLVINSGSSSIKYQLLDMTNEKVLAKGLVERIGIDGSRIVHKVNGEKHVLEHEIKNHEIGLKLVLDLLTDEKYGVLKDLKEIDAVGHRVVHGGERFASSVKITDEVLKTIETLSFLAPLHNPANIMGIKSSMKVLPGVPQVAVFDTAFHQKMPEKAYLYAIPYEYYEKYKIRRYGFHGTSHRYVSKRAAEIMGKPYDQLKIITVHVGNGASVAAVKNGVSVDTSMGFTPLEGLVMGTRSGDIDPAIVEFLEKEEGLSAKEVVNILNKKSGVYGLTKGFSSDMRDIVDNAIIGDPVCRLALDVYEYRIAKYIGAYAAAMNGVDAIVFTAGVGENSPIMREEIIENYLGYLGIKIDKEANDFKGEEKIISTPDSKVIAMVVPTNEELMIAKDTKEIIEKGLDELKI

SEQ ID NO: 711 - DNA, 1251 bp, synthetic construct
  misc_feature 1..1251: note = variant of acetate kinase from Marinitoga sp. 38H-ov
  source 1..1251: mol_type = other DNA
atgcaccatcatcatcatcatggcggtagcggcatgaaagttctggtgattaattctggtagctcctccatcaaatatcagctcctcgatatgaccaacgaaaaggtattagcgaaaggcttggtcgagcgcattggcatcgacggttcgcgtatcgtgcataaagttaacggcgaaaaacacgtgctggaacatgagattaagaatcacgaaattggacttaaattggtcctggatcttcttacggacgaaaaatacggtgtgttgaaggatctcaaagaaatcgatgcagttgggcatcgcgtagtacatggcggcgagcgttttgccagtagcgtgaagattactgacgaagtcttaaagaccatcgagacgttgtcgttcttagctccgttacacaatccagcgaacattatgggtatcaagagcagcatgaaagtgttaccgggtgtgcctcaagttgccgtctttgatacagcgttccaccagaagatgccggagaaagcctatttgtacgcaatcccctatgagtactacgagaaatataaaattcgccgctatgggtttcatggaacctcacatcgttatgtgagtaaacgtgctgcggaaattatgggcaaaccgtacgatcagctcaagatcattaccgttcacgtgggtaacggcgcatcagttgcggcggtgaagaatggcgtatctgttgacacttccatgggtttcacaccacttgaaggtcttgtcatgggcacgcgcagcggcgatattgatccggccatcgtggaatttcttgagaaagaagaaggattgtcggccaaagaagtcgtcaacatcctcaacaagaaatctggtgtgtatgggctcaccaaaggctttagtagtgacatgcgtgacattgtgctgaatgctattgaaggtgatcctgtatgccgccttgcattagatgtgtacgaatatcgtatcgcgaaatatattggcgcatacgctgcggccatgaacggtgttgacgcgatcgtctttaccgcaggagttggcgaaaatagcccgattatgcgcgaagaaattattgagaactacttgggctacttagggatcaagatcgataaagaagccaatgacttcaaaggtgaggagaagatcatttcaacgcccgattccaaagtgattgcgatggtagttccgaccaacgaggagctcatgatcgccaaagacacgaaagaaatcattgagaaagggttggacgagcttaagatc

SEQ ID NO: 712 - protein, 417 aa, synthetic construct
  REGION 1..417: note = variant of acetate kinase from Marinitoga sp. 38H-ov
MHHHHHHGGSGMKVLVINSGSSSIKYQLLDMTNEKVLAKGLVERIGIDGSRIVHKVNGEKHVLEHEIKNHEIGLKLVLDLLTDEKYGVLKDLKEIDAVGHRVVHGGERFASSVKITDEVLKTIETLSFLAPLHNPANIMGIKSSMKVLPGVPQVAVFDTAFHQKMPEKAYLYAIPYEYYEKYKIRRYGFHGTSHRYVSKRAAEIMGKPYDQLKIITVHVGNGASVAAVKNGVSVDTSMGFTPLEGLVMGTRSGDIDPAIVEFLEKEEGLSAKEVVNILNKKSGVYGLTKGFSSDMRDIVLNAIEGDPVCRLALDVYEYRIAKYIGAYAAAMNGVDAIVFTAGVGENSPIMREEIIENYLGYLGIKIDKEANDFKGEEKIISTPDSKVIAMVVPTNEELMIAKDTKEIIEKGLDELKI

SEQ ID NO: 713 - DNA, 1251 bp, synthetic construct
  misc_feature 1..1251: note = variant of acetate kinase from Marinitoga sp. 38H-ov
  source 1..1251: mol_type = other DNA
atgcaccatcatcatcatcatggcggtagcggcatgaaagttctggtgattaattctggtagctcctccatcaaatatcagctcctcgatatgaccaacgaaaaggtattagcgaaaggcttggtcgagcgcattggcatcgacggttcgcgtatcgtgcataaagttaacggcgaaaaacacgtgctggaacatgagattaagaatcacgaaattggacttaaattggtcctggatcttcttacggacgaaaaatacggtgtgttgaaggatctcaaagaaatcgatgcagttgggcatcgcgtagtacatggcggcgagcgttttgccagtagcgtgaagattactgacgaagtcttaaagaccatcgagacgttgtcgttcttagctccgttacacaatccagcgaacattatgggtatcaagagcagcatgaaagtgttaccgggtgtgcctcaagttgccgtctttgatacagcgttccaccagaagatgccggagaaagcctatttgtacgcaatcccctatgagtactacgagaaatataaaattcgccgctatgggtttcatggaacctcacatcgttatgtgagtaaacgtgctgcggaaattatgggcaaaccgtacgatcagctcaagatcattaccgttcacgtgggtaacggcgcatcagttgcggcggtgaagaatggcgtatctgttgacacttccatgggtttcacaccacttgaaggtcttgtcatgggcacgcgcagcggcgatattgatccggccatcgtggaatttcttgagaaagaagaaggattgtcggccaaagaagtcgtcaacatcctcaacaagaaatctggtgtgtatgggctcaccaaaggctttagtagtgacatgcgtgacattgtggataatgctattgaaggtgatcctgtatgccgccttgcattagatgtgtacgaatatcgtatcgcgaaatatattggcgcatacgctgcggccatgaacggtgttgacgcgatcgtctttaccgcaggagttggcgaaaatagcccgattatgcgcgaagaaattattgagaactacttgggctacttagggatcaagatcgataaagaagccaatgacttcaaagcggaggagaagatcatttcaacgcccgattccaaagtgattgcgatggtagttccgaccaacgaggagctcatgatcgccaaagacacgaaagaaatcattgagaaagggttggacgagcttaagatc

SEQ ID NO: 714 - protein, 417 aa, synthetic construct
  REGION 1..417: note = variant of acetate kinase from Marinitoga sp. 38H-ov
MHHHHHHGGSGMKVLVINSGSSSIKYQLLDMTNEKVLAKGLVERIGIDGSRIVHKVNGEKHVLEHEIKNHEIGLKLVLDLLTDEKYGVLKDLKEIDAVGHRVVHGGERFASSVKITDEVLKTIETLSFLAPLHNPANIMGIKSSMKVLPGVPQVAVFDTAFHQKMPEKAYLYAIPYEYYEKYKIRRYGFHGTSHRYVSKRAAEIMGKPYDQLKIITVHVGNGASVAAVKNGVSVDTSMGFTPLEGLVMGTRSGDIDPAIVEFLEKEEGLSAKEVVNILNKKSGVYGLTKGFSSDMRDIVDNAIEGDPVCRLALDVYEYRIAKYIGAYAAAMNGVDAIVFTAGVGENSPIMREEIIENYLGYLGIKIDKEANDFKAEEKIISTPDSKVIAMVVPTNEELMIAKDTKEIIEKGLDELKI

SEQ ID NO: 715 - DNA, 1251 bp, synthetic construct
  misc_feature 1..1251: note = variant of acetate kinase from Marinitoga sp. 38H-ov
  source 1..1251: mol_type = other DNA
atgcaccatcatcatcatcatggcggtagcggcatgaaagttctggtgattaattctggtagctcctccatcaaatatcagctcctcgatatgaccaacgaaaaggtattagcgaaaggcttggtcgagcgcattggcatcgacggttcgcgtatcgtgcataaagttaacggcgaaaaacacgtgctggaacatgagattaagaatcacgaaattggacttaaattggtcctggatcttcttacggacgaaaaatacggtgtgttgaaggatctcaaagaaatcgatgcagttgggcatcgcgtagtacatggcggcgagcgttttgccagtagcgtgaagattactgacgaagtcttaaagaccatcgagacgttgtcgttcttagctccgttacacaatccagcgaacattatgggtatcaagagcagcatgaaagtgttaccgggtgtgcctcaagttgccgtctttgatacagcgttccaccagaagatgccggagaaagcctatttgtacgcaatcccctatgagtactacgagaaatataaaattcgccgctatgggtttcatggaacctcacatcgttatgtgagtaaacgtgctgcggaaattatgggcaaaccgtacgatcagctcaagatcattaccgttcacgtgggtaacggcgcatcagttgcggcggtgaagaatggcgtatctgttgacacttccatgggtttcacaccacttgaaggtcttgtcatgggcacgcgcagcggcgatattgatccggccatcgtggaatttcttgagaaagaagaaggattgtcggccaaagaagtcgtcaacatcctcaacaagaaatctggtgtgtatgggctcaccaaaggctttagtagtgacatgcgtgacattgtggataatgctattgaaggtgatcctgtatgccgccttgcattagtggtgtacgaatatcgtatcgcgaaatatattggcgcatacgctgcggccatgaacggtgttgacgcgatcgtctttaccgcaggagttggcgaaaatagcccgattatgcgcgaagaaattattgagaactacttgggctacttagggatcaagatcgataaagaagccaatgacttcaaaggtgaggagaagatcatttcaacgcccgattccaaagtgattgcgatggtagttccgaccaacgaggagctcatgatcgccaaagacacgaaagaaatcattgagaaagggttggacgagcttaagatc

SEQ ID NO: 716 - protein, 417 aa, synthetic construct
  REGION 1..417: note = variant of acetate kinase from Marinitoga sp. 38H-ov
MHHHHHHGGSGMKVLVINSGSSSIKYQLLDMTNEKVLAKGLVERIGIDGSRIVHKVNGEKHVLEHEIKNHEIGLKLVLDLLTDEKYGVLKDLKEIDAVGHRVVHGGERFASSVKITDEVLKTIETLSFLAPLHNPANIMGIKSSMKVLPGVPQVAVFDTAFHQKMPEKAYLYAIPYEYYEKYKIRRYGFHGTSHRYVSKRAAEIMGKPYDQLKIITVHVGNGASVAAVKNGVSVDTSMGFTPLEGLVMGTRSGDIDPAIVEFLEKEEGLSAKEVVNILNKKSGVYGLTKGFSSDMRDIVDNAIEGDPVCRLALVVYEYRIAKYIGAYAAAMNGVDAIVFTAGVGENSPIMREEIIENYLGYLGIKIDKEANDFKGEEKIISTPDSKVIAMVVPTNEELMIAKDTKEIIEKGLDELKI

SEQ ID NO: 717 - DNA, 1251 bp, synthetic construct
  misc_feature 1..1251: note = variant of acetate kinase from Marinitoga sp. 38H-ov
  source 1..1251: mol_type = other DNA
atgcaccatcatcatcatcatggcggtagcggcatgaaagttctggtgattaattctggtagctcctccatcaaatatcagctcctcgatatgaccaacgaaaaggtattagcgaaaggcttggtcgagcgcattggcatcgacggttcgcgtatcgtgcataaagttaacggcgaaaaacacgtgctggaacatgagattaagaatcacgaaattggacttaaattggtcctggatcttcttacggacgaaaaatacggtgtgttgaaggatctcaaagaaatcgatgcagttgggcatcgcgtagtacatggcggcgagcgttttgccagtagcgtgaagattactgacgaagtcttaaagaccatcgagacgttgtcgttcttagctccgttacacaatccagcgaacattatgggtatcaagagcagcatgaaagtgttaccgggtgtgcctcaagttgccgtctttgatacagcgttccaccagaagatgccggagaaagcctatttgtacgcaatcccctatgagtactacgagaaatataaaattcgccgctatgggtttcatggaacctcacatcgttatgtgagtaaacgtgctgcggaaattatgggcaaaccgtacgatcagctcaagatcattaccgttcacgtgggtaacggcgcatcagttgcggcggtgaagaatggcgtatctgttgacacttccatgggtttcacaccacttgaaggtcttgtcatgggcacgcgcagcggcgatattgatccggccatcgtggaatttcttgagaaagaagaaggattgtcggccaaagaagtcgtcaacatcctcaacaagaaatctggtgtgtatgggctcaccaaaggctttagtagtgacatgcgtgacattgtggataatgctattgaaggtgatcctgtatgccgccttgcattatgggtgtacgaatatcgtatcgcgaaatatattggcgcatacgctgcggccatgaacggtgttgacgcgatcgtctttaccgcaggagttggcgaaaatagcccgattatgcgcgaagaaattattgagaactacttgggctacttagggatcaagatcgataaagaagccaatgacttcaaaggtgaggagaagatcatttcaacgcccgattccaaagtgattgcgatggtagttccgaccaacgaggagctcatgatcgccaaagacacgaaagaaatcattgagaaagggttggacgagcttaagatc

SEQ ID NO: 718 - protein, 417 aa, synthetic construct
  REGION 1..417: note = variant of acetate kinase from Marinitoga sp. 38H-ov
MHHHHHHGGSGMKVLVINSGSSSIKYQLLDMTNEKVLAKGLVERIGIDGSRIVHKVNGEKHVLEHEIKNHEIGLKLVLDLLTDEKYGVLKDLKEIDAVGHRVVHGGERFASSVKITDEVLKTIETLSFLAPLHNPANIMGIKSSMKVLPGVPQVAVFDTAFHQKMPEKAYLYAIPYEYYEKYKIRRYGFHGTSHRYVSKRAAEIMGKPYDQLKIITVHVGNGASVAAVKNGVSVDTSMGFTPLEGLVMGTRSGDIDPAIVEFLEKEEGLSAKEVVNILNKKSGVYGLTKGFSSDMRDIVDNAIEGDPVCRLALWVYEYRIAKYIGAYAAAMNGVDAIVFTAGVGENSPIMREEIIENYLGYLGIKIDKEANDFKGEEKIISTPDSKVIAMVVPTNEELMIAKDTKEIIEKGLDELKI

SEQ ID NO: 719 - DNA, 1251 bp, synthetic construct
  misc_feature 1..1251: note = variant of acetate kinase from Marinitoga sp. 38H-ov
  source 1..1251: mol_type = other DNA
atgcaccatcatcatcatcatggcggtagcggcatgaaagttctggtgattaattctggtagctcctccatcaaatatcagctcctcgatatgaccaacgaaaaggtattagcgaaaggcttggtcgagcgcattggcatcgacggttcgcgtatcgtgcataaagttaacggcgaaaaacacgtgctggaacatgagattaagaatcacgaaattggacttaaattggtcctggatcttcttacggacgaaaaatacggtgtgttgaaggatctcaaagaaatcgatgcagttgggcatcgcgtagtacatggcggcgagcgttttgccagtagcgtgaagattactgacgaagtcttaaagaccatcgagacgttgtcgttcttagctccgttacacaatccagcgaacattatgggtatcaagagcagcatgaaagtgttaccgggtgtgcctcaagttgccgtctttgatacagcgttccaccagaagatgccggagaaagcctatttgtacgcaatcccctatgagtactacgagaaatataaaattcgccgctatgggtttcatggaacctcacatcgttatgtgagtaaacgtgctgcggaaattatgggcaaaccgtacgatcagctcaagatcattaccgttcacgtgggtaacggcgcatcagttgcggcggtgaagaatggcgtatctgttgacacttccatgggtttcacaccacttgaaggtcttgtcatgggcacgcgcagcggcgatattgatccggccatcgtggaatttcttgagaaagaagaaggattgtcggccaaagaagtcgtcaacatcctcaacaagaaatctggtgtgtatgggctcaccaaaggctttagtagtgacatgcgtgacattgtggataatgctattgaaggtgatcctgtacatcgccttgcattagatgtgtacgaatatcgtatcgcgaaatatattggcgcatacgctgcggccatgaacggtgttgacgcgatcgtctttaccgcaggagttggcgaaaatagcccgattatgcgcgaagaaattattgagaactacttgggctacttagggatcaagatcgataaagaagccaatgacttcaaaggtgaggagaagatcatttcaacgcccgattccaaagtgattgcgatggtagttccgaccaacgaggagctcatgatcgccaaagacacgaaagaaatcattgagaaagggttggacgagcttaagatc

SEQ ID NO: 720 - protein, 417 aa, synthetic construct
  REGION 1..417: note = variant of acetate kinase from Marinitoga sp. 38H-ov
MHHHHHHGGSGMKVLVINSGSSSIKYQLLDMTNEKVLAKGLVERIGIDGSRIVHKVNGEKHVLEHEIKNHEIGLKLVLDLLTDEKYGVLKDLKEIDAVGHRVVHGGERFASSVKITDEVLKTIETLSFLAPLHNPANIMGIKSSMKVLPGVPQVAVFDTAFHQKMPEKAYLYAIPYEYYEKYKIRRYGFHGTSHRYVSKRAAEIMGKPYDQLKIITVHVGNGASVAAVKNGVSVDTSMGFTPLEGLVMGTRSGDIDPAIVEFLEKEEGLSAKEVVNILNKKSGVYGLTKGFSSDMRDIVDNAIEGDPVHRLALDVYEYRIAKYIGAYAAAMNGVDAIVFTAGVGENSPIMREEIIENYLGYLGIKIDKEANDFKGEEKIISTPDSKVIAMVVPTNEELMIAKDTKEIIEKGLDELKI

SEQ ID NO: 721 - DNA, 1251 bp, synthetic construct
  misc_feature 1..1251: note = variant of acetate kinase from Marinitoga sp. 38H-ov
  source 1..1251: mol_type = other DNA
atgcaccatcatcatcatcatggcggtagcggcatgaaagttctggtgattaattctggtagctcctccatcaaatatcagctcctcgatatgaccaacgaaaaggtattagcgaaaggcttggtcgagcgcattggcatcgacggttcgcgtatcgtgcataaagttaacggcgaaaaacacgtgctggaacatgagattaagaatcacgaaattggacttaaattggtcctggatcttcttacggacgaaaaatacggtgtgttgaaggatctcaaagaaatcgatgcagttgggcatcgcgtagtacatggcggcgagcgttttgccagtagcgtgaagattactgacgaagtcttaaagaccatcgagacgttgtcgttcttagctccgttacacaatccagcgaacattatgggtatcaagagcagcatgaaagtgttaccgggtgtgcctcaagttgccgtctttgatacagcgttccaccagaagatgccggagaaagcctatttgtacgcaatcccctatgagtactacgagaaatataaaattcgccgctatgggtttcatggaacctcacatcgttatgtgagtaaacgtgctgcggaaattatgggcaaaccgtacgatcagctcaagatcattaccgttcacgtgggtaacggcgcatcagttgcggcggtgaagaatggcgtatctgttgacacttccatgggtttcacaccacttgaaggtcttgtcatgggcacgcgcagcggcgatattgatccggccatcgtggaatttcttgagaaagaagaaggattgtcggccaaagaagtcgtcaacatcctcaacaagaaatctggtgtgtatgggctcaccaaaggctttagtagtgacatgcgtaatattgtggataatgctattgaaggtgatcctgtatgccgccttgcattagatgtgtacgaatatcgtatcgcgaaatatattggcgcatacgctgcggccatgaacggtgttgacgcgatcgtctttaccgcaggagttggcgaaaatagcccgattatgcgcgaagaaattattgagaactacttgggctacttagggatcaagatcgataaagaagccaatgacttcaaaggtgaggagaagatcatttcaacgcccgattccaaagtgattgcgatggtagttccgaccaacgaggagctcatgatcgccaaagacacgaaagaaatcattgagaaagggttggacgagcttaagatc

SEQ ID NO: 722 - protein, 417 aa, synthetic construct
  REGION 1..417: note = variant of acetate kinase from Marinitoga sp. 38H-ov
MHHHHHHGGSGMKVLVINSGSSSIKYQLLDMTNEKVLAKGLVERIGIDGSRIVHKVNGEKHVLEHEIKNHEIGLKLVLDLLTDEKYGVLKDLKEIDAVGHRVVHGGERFASSVKITDEVLKTIETLSFLAPLHNPANIMGIKSSMKVLPGVPQVAVFDTAFHQKMPEKAYLYAIPYEYYEKYKIRRYGFHGTSHRYVSKRAAEIMGKPYDQLKIITVHVGNGASVAAVKNGVSVDTSMGFTPLEGLVMGTRSGDIDPAIVEFLEKEEGLSAKEVVNILNKKSGVYGLTKGFSSDMRNIVDNAIEGDPVCRLALDVYEYRIAKYIGAYAAAMNGVDAIVFTAGVGENSPIMREEIIENYLGYLGIKIDKEANDFKGEEKIISTPDSKVIAMVVPTNEELMIAKDTKEIIEKGLDELKI

SEQ ID NO: 723 - DNA, 1251 bp, synthetic construct
  misc_feature 1..1251: note = variant of acetate kinase from Marinitoga sp. 38H-ov
  source 1..1251: mol_type = other DNA
atgcaccatcatcatcatcatggcggtagcggcatgaaagttctggtgattaattctggtagctcctccatcaaatatcagctcctcgatatgaccaacgaaaaggtattagcgaaaggcttggtcgagcgcattggcatcgacggttcgcgtatcgtgcataaagttaacggcgaaaaacacgtgctggaacatgagattaagaatcacgaaattggacttaaattggtcctggatcttcttacggacgaaaaatacggtgtgttgaaggatctcaaagaaatcgatgcagttgggcatcgcgtagtacatggcggcgagcgttttgccagtagcgtgaagattactgacgaagtcttaaagaccatcgagacgttgtcgttcttagctccgttacacaatccagcgaacattatgggtatcaagagcagcatgaaagtgttaccgggtgtgcctcaagttgccgtctttgatacagcgttccaccagaagatgccggagaaagcctatttgtacgcaatcccctatgagtactacgagaaatataaaattcgccgctatgggtttcatggaacctcacatcgttatgtgagtaaacgtgctgcggaaattatgggcaaaccgtacgatcagctcaagatcattaccgttcacgtgggtaacggcgcatcagttgcggcggtgaagaatggcgtatctgttgacacttccatgggtttcacaccacttgaaggtcttgtcatgggcacgcgcagcggcgatattgatccggccatcgtggaatttcttgagaaagaagaaggattgtcggccaaagaagtcgtcaacatcctcaacaagaaatctggtgtgcaggggctcaccaaaggctttagtagtgacatgcgtgacattgtggataatgctattgaaggtgatcctgtatgccgccttgcattagatgtgtacgaatatcgtatcgcgaaatatattggcgcatacgctgcggccatgaacggtgttgacgcgatcgtctttaccgcaggagttggcgaaaatagcccgattatgcgcgaagaaattattgagaactacttgggctacttagggatcaagatcgataaagaagccaatgacttcaaaggtgaggagaagatcatttcaacgcccgattccaaagtgattgcgatggtagttccgaccaacgaggagctcatgatcgccaaagacacgaaagaaatcattgagaaagggttggacgagcttaagatc

SEQ ID NO: 724 - protein, 417 aa, synthetic construct
  REGION 1..417: note = variant of acetate kinase from Marinitoga sp. 38H-ov
MHHHHHHGGSGMKVLVINSGSSSIKYQLLDMTNEKVLAKGLVERIGIDGSRIVHKVNGEKHVLEHEIKNHEIGLKLVLDLLTDEKYGVLKDLKEIDAVGHRVVHGGERFASSVKITDEVLKTIETLSFLAPLHNPANIMGIKSSMKVLPGVPQVAVFDTAFHQKMPEKAYLYAIPYEYYEKYKIRRYGFHGTSHRYVSKRAAEIMGKPYDQLKIITVHVGNGASVAAVKNGVSVDTSMGFTPLEGLVMGTRSGDIDPAIVEFLEKEEGLSAKEVVNILNKKSGVQGLTKGFSSDMRDIVDNAIEGDPVCRLALDVYEYRIAKYIGAYAAAMNGVDAIVFTAGVGENSPIMREEIIENYLGYLGIKIDKEANDFKGEEKIISTPDSKVIAMVVPTNEELMIAKDTKEIIEKGLDELKI

SEQ ID NO: 725 - DNA, 1251 bp, synthetic construct
  misc_feature 1..1251: note = variant of acetate kinase from Marinitoga sp. 38H-ov
  source 1..1251: mol_type = other DNA
atgcaccatcatcatcatcatggcggtagcggcatgaaagttctggtgattaattctggtagctcctccatcaaatatcagctcctcgatatgaccaacgaaaaggtattagcgaaaggcttggtcgagcgcattggcatcgacggttcgcgtatcgtgcataaagttaacggcgaaaaacacgtgctggaacatgagattaagaatcacgaaattggacttaaattggtcctggatcttcttacggacgaaaaatacggtgtgttgaaggatctcaaagaaatcgatgcagttgggcatcgcgtagtacatggcggcgagcgttttgccagtagcgtgaagattactgacgaagtcttaaagaccatcgagacgttgtcgttcttagctccgttacacaatccagcgaacattatgggtatcaagagcagcatgaaagtgttaccgggtgtgcctcaagttgccgtctttgatacagcgttccaccagaagatgccggagaaagcctatttgtacgcaatcccctatgagtactacgagaaatataaaattcgccgctatgggtttcatggaacctcacatcgttatgtgagtaaacgtgctgcggaaattatgggcaaaccgtacgatcagctcaagatcattaccgttcacgtgggtaacggcgcatcagttgcggcggtgaagaatggcgtatctgttgacacttccatgggtttcacaccacttgaaggtcttgtcatgggcacgcgcagcggcgatattgatccggccatcgtggaatttcttgagaaagaagaaggattgtcggccaaagaagtcgtcaacatcctcaacaagaaatctggtgtgtatgggctcaccaaaggctttagtagtgacatgcgtgacattgtggataatgctattgaaggtgatcctgtatgccgccttgcattagatgtgtacgaatatcgtatcgcgaaatatattggcgcatacgctgcggccatgaacggtgttgacgcgatcgtctttaccgcaggagttggcgaaaatagcccgattatgcgcgaagaaattattgagaactacttgggctacttagggatcaagatcgataaagaagccaatgacttcaaaggtgaggagaagatcatttcaacgcccgattccaaagtgattgcgatggtagtttttaccaacgaggagctcatgatcgccaaagacacgaaagaaatcattgagaaagggttggacgagcttaagatc

SEQ ID NO: 726 - protein, 417 aa, synthetic construct
  REGION 1..417: note = variant of acetate kinase from Marinitoga sp. 38H-ov
MHHHHHHGGSGMKVLVINSGSSSIKYQLLDMTNEKVLAKGLVERIGIDGSRIVHKVNGEKHVLEHEIKNHEIGLKLVLDLLTDEKYGVLKDLKEIDAVGHRVVHGGERFASSVKITDEVLKTIETLSFLAPLHNPANIMGIKSSMKVLPGVPQVAVFDTAFHQKMPEKAYLYAIPYEYYEKYKIRRYGFHGTSHRYVSKRAAEIMGKPYDQLKIITVHVGNGASVAAVKNGVSVDTSMGFTPLEGLVMGTRSGDIDPAIVEFLEKEEGLSAKEVVNILNKKSGVYGLTKGFSSDMRDIVDNAIEGDPVCRLALDVYEYRIAKYIGAYAAAMNGVDAIVFTAGVGENSPIMREEIIENYLGYLGIKIDKEANDFKGEEKIISTPDSKVIAMVVFTNEELMIAKDTKEIIEKGLDELKI

SEQ ID NO: 727 - DNA, 1251 bp, synthetic construct
  misc_feature 1..1251: note = variant of acetate kinase from Marinitoga sp. 38H-ov
  source 1..1251: mol_type = other DNA
atgcaccatcatcatcatcatggcggtagcggcatgaaagttctggtgattaattctggtagctcctccatcaaatatcagctcctcgatatgaccaacgaaaaggtattagcgaaaggcttggtcgagcgcattggcatcgacggttcgcgtatcgtgcataaagttaacggcgaaaaacacgtgctggaacatgagattaagaatcacgaaattggacttaaattggtcctggatcttcttacggacgaaaaatacggtgtgttgaaggatctcaaagaaatcgatgcagttgggcatcgcgtagtacatggcggcgagcgttttgccagtagcgtgaagattactgacgaagtcttaaagaccatcgagacgttgtcgttcttagctccgttacacaatccagcgaacattatgggtatcaagagcagcatgaaagtgttaccgggtgtgcctcaagttgccgtctttgatacagcgttccaccagaagatgccggagaaagcctatttgtacgcaatcccctatgagtactacgagaaatataaaattcgccgctatgggtttcatggaacctcacatcgttatgtgagtaaacgtgctgcggaaattatgggcaaaccgtacgatcagctcaagatcattaccgttcacgtgggtaacggcgcatcagttgcggcggtgaagaatggcgtatctgttgacacttccatgggtttcacaccacttgaaggtcttgtcatgggcacgcgcagcggcgatattgatccggccatcgtggaatttcttgagaaagaagaaggattgtcggccaaagaagtcgtcaacatcctcaacaagaaatctggtgtgtatgggctcaccaaaggctttcagagtgacatgcgtgacattgtggataatgctattgaaggtgatcctgtatgccgccttgcattagatgtgtacgaatatcgtatcgcgaaatatattggcgcatacgctgcggccatgaacggtgttgacgcgatcgtctttaccgcaggagttggcgaaaatagcccgattatgcgcgaagaaattattgagaactacttgggctacttagggatcaagatcgataaagaagccaatgacttcaaaggtgaggagaagatcatttcaacgcccgattccaaagtgattgcgatggtagttccgaccaacgaggagctcatgatcgccaaagacacgaaagaaatcattgagaaagggttggacgagcttaagatc

SEQ ID NO: 728 - protein, 417 aa, synthetic construct
  REGION 1..417: note = variant of acetate kinase from Marinitoga sp. 38H-ov
MHHHHHHGGSGMKVLVINSGSSSIKYQLLDMTNEKVLAKGLVERIGIDGSRIVHKVNGEKHVLEHEIKNHEIGLKLVLDLLTDEKYGVLKDLKEIDAVGHRVVHGGERFASSVKITDEVLKTIETLSFLAPLHNPANIMGIKSSMKVLPGVPQVAVFDTAFHQKMPEKAYLYAIPYEYYEKYKIRRYGFHGTSHRYVSKRAAEIMGKPYDQLKIITVHVGNGASVAAVKNGVSVDTSMGFTPLEGLVMGTRSGDIDPAIVEFLEKEEGLSAKEVVNILNKKSGVYGLTKGFQSDMRDIVDNAIEGDPVCRLALDVYEYRIAKYIGAYAAAMNGVDAIVFTAGVGENSPIMREEIIENYLGYLGIKIDKEANDFKGEEKIISTPDSKVIAMVVPTNEELMIAKDTKEIIEKGLDELKI

SEQ ID NO: 729 - DNA, 1251 bp, synthetic construct
  misc_feature 1..1251: note = variant of acetate kinase from Marinitoga sp. 38H-ov
  source 1..1251: mol_type = other DNA
atgcaccatcatcatcatcatggcggtagcggcatgaaagttctggtgattaattctggtagctcctccatcaaatatcagctcctcgatatgaccaacgaaaaggtattagcgaaaggcttggtcgagcgcattggcatcgacggttcgcgtatcgtgcataaagttaacggcgaaaaacacgtgctggaacatgagattaagaatcacgaaattggacttaaattggtcctggatcttcttacggacgaaaaatacggtgtgttgaaggatctcaaagaaatcgatgcagttgggcatcgcgtagtacatggcggcgagcgttttgccagtagcgtgaagattactgacgaagtcttaaagaccatcgagacgttgtcgttcttagctccgttacacaatccagcgaacattatgggtatcaagagcagcatgaaagtgttaccgggtgtgcctcaagttgccgtctttgatacagcgttccaccagaagatgccggagaaagcctatttgtacgcaatcccctatgagtactacgagaaatataaaattcgccgctatgggtttcatggaacctcacatcgttatgtgagtaaacgtgctgcggaaattatgggcaaaccgtacgatcagctcaagatcattaccgttcacgtgggtaacggcgcatcagttgcggcggtgaagaatggcgtatctgttgacacttccatgggtttcacaccacttgaaggtcttgtcatgggcacgcgcagcggcgatattgatccggccatcgtggaatttcttgagaaagaagaaggattgtcggccaaagaagtcgtcaacatcctcaacaagaaatctggtgtgtatgggctcaccaaaggctttagtagtgacatgcgtgacattgtggataatgctattgaaggtgatcctgtatgccgccttgcattagatgtgtacgaatatcgtatcgcgaaatatattggcgcatacgctgcggccatgaacggtgttgacgcgatcgtctttaccgcaggagttggcgaaaatagcccgattatgcgcgaagaaattattgagaactacttgggctacttagggatcaagatcgataaagaagccaatgacttcaaaggtgaggagaagatcatttcaacgcccgattccaaagtgattgcgatgcaggttccgaccaacgaggagctcatgatcgccaaagacacgaaagaaatcattgagaaagggttggacgagcttaagatc

SEQ ID NO: 730 - protein, 417 aa, synthetic construct
  REGION 1..417: note = variant of acetate kinase from Marinitoga sp. 38H-ov
MHHHHHHGGSGMKVLVINSGSSSIKYQLLDMTNEKVLAKGLVERIGIDGSRIVHKVNGEKHVLEHEIKNHEIGLKLVLDLLTDEKYGVLKDLKEIDAVGHRVVHGGERFASSVKITDEVLKTIETLSFLAPLHNPANIMGIKSSMKVLPGVPQVAVFDTAFHQKMPEKAYLYAIPYEYYEKYKIRRYGFHGTSHRYVSKRAAEIMGKPYDQLKIITVHVGNGASVAAVKNGVSVDTSMGFTPLEGLVMGTRSGDIDPAIVEFLEKEEGLSAKEVVNILNKKSGVYGLTKGFSSDMRDIVDNAIEGDPVCRLALDVYEYRIAKYIGAYAAAMNGVDAIVFTAGVGENSPIMREEIIENYLGYLGIKIDKEANDFKGEEKIISTPDSKVIAMQVPTNEELMIAKDTKEIIEKGLDELKI

SEQ ID NO: 731 - DNA, 1251 bp, synthetic construct
  misc_feature 1..1251: note = variant of acetate kinase from Marinitoga sp. 38H-ov
  source 1..1251: mol_type = other DNA
atgcaccatcatcatcatcatggcggtagcggcatgaaagttctggtgattaattctggtagctcctccatcaaatatcagctcctcgatatgaccaacgaaaaggtattagcgaaaggcttggtcgagcgcattggcatcgacggttcgcgtatcgtgcataaagttaacggcgaaaaacacgtgctggaacatgagattaagaatcacgaaattggacttaaattggtcctggatcttcttacggacgaaaaatacggtgtgttgaaggatctcaaagaaatcgatgcagttgggcatcgcgtagtacatggcggcgagcgttttgccagtagcgtgaagattactgacgaagtcttaaagaccatcgagacgttgtcgttcttagctccgttacacaatccagcgaacattatgggtatcaagagcagcatgaaagtgttaccgggtgtgcctcaagttgccgtctttgatacagcgttccaccagaagatgccggagaaagcctatttgtacgcaatcccctatgagtactacgagaaatataaaattcgccgctatgggtttcatggaacctcacatcgttatgtgagtaaacgtgctgcggaaattatgggcaaaccgtacgatcagctcaagatcattaccgttcacgtgggtaacggcgcatcagttgcggcggtgaagaatggcgtatctgttgacacttccatgggtttcacaccacttgaaggtcttgtcatgggcacgcgcagcggcgatattgatccggccatcgtggaatttcttgagaaagaagaaggattgtcggccaaagaagtcgtcaacatcctcaacaagaaatctggtgtgtatgggctcaccaaaggctttagtagtgacatgcgtgacattgtggataatgctattgaaggtgatcctgtatgccgccttgcattagatgtgtacgaatatcgtatcgcgaaatatattggcgcatacgctgcggccatgaacggtgttgacgcgatcgtctttaccgcaggagttggcgaaaatagcccgatttgtcgcgaagaaattattgagaactacttgggctacttagggatcaagatcgataaagaagccaatgacttcaaaggtgaggagaagatcatttcaacgcccgattccaaagtgattgcgatggtagttccgaccaacgaggagctcatgatcgccaaagacacgaaagaaatcattgagaaagggttggacgagcttaagatc

SEQ ID NO: 732 - protein, 417 aa, synthetic construct
  REGION 1..417: note = variant of acetate kinase from Marinitoga sp. 38H-ov
MHHHHHHGGSGMKVLVINSGSSSIKYQLLDMTNEKVLAKGLVERIGIDGSRIVHKVNGEKHVLEHEIKNHEIGLKLVLDLLTDEKYGVLKDLKEIDAVGHRVVHGGERFASSVKITDEVLKTIETLSFLAPLHNPANIMGIKSSMKVLPGVPQVAVFDTAFHQKMPEKAYLYAIPYEYYEKYKIRRYGFHGTSHRYVSKRAAEIMGKPYDQLKIITVHVGNGASVAAVKNGVSVDTSMGFTPLEGLVMGTRSGDIDPAIVEFLEKEEGLSAKEVVNILNKKSGVYGLTKGFSSDMRDIVDNAIEGDPVCRLALDVYEYRIAKYIGAYAAAMNGVDAIVFTAGVGENSPICREEIIENYLGYLGIKIDKEANDFKGEEKIISTPDSKVIAMVVPTNEELMIAKDTKEIIEKGLDELKI

SEQ ID NO: 733 - DNA, 1251 bp, synthetic construct
  misc_feature 1..1251: note = variant of acetate kinase from Marinitoga sp. 38H-ov
  source 1..1251: mol_type = other DNA
atgcaccatcatcatcatcatggcggtagcggcatgaaagttctggtgattaattctggtagctcctccatcaaatatcagctcctcgatatgaccaacgaaaaggtattagcgaaaggcttggtcgagcgcattggcatcgacggttcgcgtatcgtgcataaagttaacggcgaaaaacacgtgctggaacatgagattaagaatcacgaaattggacttaaattggtcctggatcttcttacggacgaaaaatacggtgtgttgaaggatctcaaagaaatcgatgcagttgggcatcgcgtagtacatggcggcgagcgttttgccagtagcgtgaagattactgacgaagtcttaaagaccatcgagacgttgtcgttcttagctccgttacacaatccagcgaacattatgggtatcaagagcagcatgaaagtgttaccgggtgtgcctcaagttgccgtctttgatacagcgttccaccagaagatgccggagaaagcctatttgtacgcaatcccctatgagtactacgagaaatataaaattcgccgctatgggtttcatggaacctcacatcgttatgtgagtaaacgtgctgcggaaattatgggcaaaccgtacgatcagctcaagatcattaccgttcacgtgggtaacggcgcatcagttgcggcggtgaagaatggcgtatctgttgacacttccatgggtttcacaccacttgaaggtcttgtcatgggcacgcgcagcggcgatattgatccggccatcgtggaatttcttgagaaagaagaaggattgtcggccaaagaagtcgtcaacatcctcaacaagaaatctggtgtgtatgggctcaccaaaggctttagtagtgacatgcgtgacattgtggattgtgctattgaaggtgatcctgtatgccgccttgcattagatgtgtacgaatatcgtatcgcgaaatatattggcgcatacgctgcggccatgaacggtgttgacgcgatcgtctttaccgcaggagttggcgaaaatagcccgattatgcgcgaagaaattattgagaactacttgggctacttagggatcaagatcgataaagaagccaatgacttcaaaggtgaggagaagatcatttcaacgcccgattccaaagtgattgcgatggtagttccgaccaacgaggagctcatgatcgccaaagacacgaaagaaatcattgagaaagggttggacgagcttaagatc

SEQ ID NO: 734 - protein, 417 aa, synthetic construct
  REGION 1..417: note = variant of acetate kinase from Marinitoga sp. 38H-ov
MHHHHHHGGSGMKVLVINSGSSSIKYQLLDMTNEKVLAKGLVERIGIDGSRIVHKVNGEKHVLEHEIKNHEIGLKLVLDLLTDEKYGVLKDLKEIDAVGHRVVHGGERFASSVKITDEVLKTIETLSFLAPLHNPANIMGIKSSMKVLPGVPQVAVFDTAFHQKMPEKAYLYAIPYEYYEKYKIRRYGFHGTSHRYVSKRAAEIMGKPYDQLKIITVHVGNGASVAAVKNGVSVDTSMGFTPLEGLVMGTRSGDIDPAIVEFLEKEEGLSAKEVVNILNKKSGVYGLTKGFSSDMRDIVDCAIEGDPVCRLALDVYEYRIAKYIGAYAAAMNGVDAIVFTAGVGENSPIMREEIIENYLGYLGIKIDKEANDFKGEEKIISTPDSKVIAMVVPTNEELMIAKDTKEIIEKGLDELKI

SEQ ID NO: 735 - DNA, 1251 bp, synthetic construct
  misc_feature 1..1251: note = variant of acetate kinase from Marinitoga sp. 38H-ov
  source 1..1251: mol_type = other DNA
atgcaccatcatcatcatcatggcggtagcggcatgaaagttctggtgattaattctggtagctcctccatcaaatatcagctcctcgatatgaccaacgaaaaggtattagcgaaaggcttggtcgagcgcattggcatcgacggttcgcgtatcgtgcataaagttaacggcgaaaaacacgtgctggaacatgagattaagaatcacgaaattggacttaaattggtcctggatcttcttacggacgaaaaatacggtgtgttgaaggatctcaaagaaatcgatgcagttgggcatcgcgtagtacatggcggcgagcgttttgccagtagcgtgaagattactgacgaagtcttaaagaccatcgagacgttgtcgttcttagctccgttacacaatccagcgaacattatgggtatcaagagcagcatgaaagtgttaccgggtgtgcctcaagttgccgtctttgatacagcgttccaccagaagatgccggagaaagcctatttgtacgcaatcccctatgagtactacgagaaatataaaattcgccgctatgggtttcatggaacctcacatcgttatgtgagtaaacgtgctgcggaaattatgggcaaaccgtacgatcagctcaagatcattaccgttcacgtgggtaacggcgcatcaggggcggcggtgaagaatggcgtatctgttgacacttccatgggtttcacaccacttgaaggtcttgtcatgggcacgcgcagcggcgatattgatccggccatcgtggaatttcttgagaaagaagaaggattgtcggccaaagaagtcgtcaacatcctcaacaagaaatctggtgtgtatgggctcaccaaaggctttagtagtgacatgcgtgacattgtggataatgctattgaaggtgatcctgtatgccgccttgcattagatgtgtacgaatatcgtatcgcgaaatatattggcgcatacgctgcggccatgaacggtgttgacgcgatcgtctttaccgcaggagttggcgaaaatagcccgattatgcgcgaagaaattattgagaactacttgggctacttagggatcaagatcgataaagaagccaatgacttcaaaggtgaggagaagatcatttcaacgcccgattccaaagtgattgcgatggtagttccgaccaacgaggagctcatgatcgccaaagacacgaaagaaatcattgagaaagggttggacgagcttaagatc

SEQ ID NO: 736 - protein, 417 aa, synthetic construct
  REGION 1..417: note = variant of acetate kinase from Marinitoga sp. 38H-ov
MHHHHHHGGSGMKVLVINSGSSSIKYQLLDMTNEKVLAKGLVERIGIDGSRIVHKVNGEKHVLEHEIKNHEIGLKLVLDLLTDEKYGVLKDLKEIDAVGHRVVHGGERFASSVKITDEVLKTIETLSFLAPLHNPANIMGIKSSMKVLPGVPQVAVFDTAFHQKMPEKAYLYAIPYEYYEKYKIRRYGFHGTSHRYVSKRAAEIMGKPYDQLKIITVHVGNGASGAAVKNGVSVDTSMGFTPLEGLVMGTRSGDIDPAIVEFLEKEEGLSAKEVVNILNKKSGVYGLTKGFSSDMRDIVDNAIEGDPVCRLALDVYEYRIAKYIGAYAAAMNGVDAIVFTAGVGENSPIMREEIIENYLGYLGIKIDKEANDFKGEEKIISTPDSKVIAMVVPTNEELMIAKDTKEIIEKGLDELKI

SEQ ID NO: 737 - DNA, 1251 bp, synthetic construct
  misc_feature 1..1251: note = variant of acetate kinase from Marinitoga sp. 38H-ov
  source 1..1251: mol_type = other DNA
atgcaccatcatcatcatcatggcggtagcggcatgaaagttctggtgattaattctggtagctcctccatcaaatatcagctcctcgatatgaccaacgaaaaggtattagcgaaaggcttggtcgagcgcattggcatcgacggttcgcgtatcgtgcataaagttaacggcgaaaaacacgtgctggaacatgagattaagaatcacgaaattggacttaaattggtcctggatcttcttacggacgaaaaatacggtgtgttgaaggatctcaaagaaatcgatgcagttgggcatcgcgtagtacatggcggcgagcgttttgccagtagcgtgaagattactgacgaagtcttaaagaccatcgagacgttgtcgttcttagctccgttacacaatccagcgaacattatgggtatcaagagcagcatgaaagtgttaccgggtgtgcctcaagttgccgtctttgatacagcgttccaccagaagatgccggagaaagcctatttgtacgcaatcccctatgagtactacgagaaatataaaattcgccgctatgggtttcatggaacctcacatcgttatgtgagtaaacgtgctgcggaaattatgggcaaaccgtacgatcagctcaagatcattaccgttcacgtgggtaacggcgcatcagttgcggcggtgaagaatggcgtatctgttgacacttccatgggtttcacaccacttgaaggtcttgtcatgggcacgcgcagcggcgatattgatccggccatcgtggaatttcttgagaaagaagaaggattgtcggccaaagaagtcgtcaacatcctcaacaagaaatctggtgtgtatgggctcaccaaaggctttagtagtgacatgcgtgacattgtggataatgctattgaaggtgatcctgtatgccgccttgcattagatgtgtacgaatatcgtatcgcgaaatatattggcgcatacgctgcggccatgaacggtgttgacgcgatcgtctttaccgcaggagttggcgaaaatagcccgattatgcgcgaagaaattattgagaactacttgggctacttagggatcaagatcgataaagaagccaatttgttcaaaggtgaggagaagatcatttcaacgcccgattccaaagtgattgcgatggtagttccgaccaacgaggagctcatgatcgccaaagacacgaaagaaatcattgagaaagggttggacgagcttaagatc

SEQ ID NO: 738 - protein, 417 aa, synthetic construct
  REGION 1..417: note = variant of acetate kinase from Marinitoga sp. 38H-ov
MHHHHHHGGSGMKVLVINSGSSSIKYQLLDMTNEKVLAKGLVERIGIDGSRIVHKVNGEKHVLEHEIKNHEIGLKLVLDLLTDEKYGVLKDLKEIDAVGHRVVHGGERFASSVKITDEVLKTIETLSFLAPLHNPANIMGIKSSMKVLPGVPQVAVFDTAFHQKMPEKAYLYAIPYEYYEKYKIRRYGFHGTSHRYVSKRAAEIMGKPYDQLKIITVHVGNGASVAAVKNGVSVDTSMGFTPLEGLVMGTRSGDIDPAIVEFLEKEEGLSAKEVVNILNKKSGVYGLTKGFSSDMRDIVDNAIEGDPVCRLALDVYEYRIAKYIGAYAAAMNGVDAIVFTAGVGENSPIMREEIIENYLGYLGIKIDKEANLFKGEEKIISTPDSKVIAMVVPTNEELMIAKDTKEIIEKGLDELKI

SEQ ID NO: 739 - DNA, 1251 bp, synthetic construct
  misc_feature 1..1251: note = variant of acetate kinase from Marinitoga sp. 38H-ov
  source 1..1251: mol_type = other DNA
atgcaccatcatcatcatcatggcggtagcggcatgaaagttctggtgattaattctggtagctcctccatcaaatatcagctcctcgatatgaccaacgaaaaggtattagcgaaaggcttggtcgagcgcattggcatcgacggttcgcgtatcgtgcataaagttaacggcgaaaaacacgtgctggaacatgagattaagaatcacgaaattggacttaaattggtcctggatcttcttacggacgaaaaatacggtgtgttgaaggatctcaaagaaatcgatgcagttgggcatcgcgtagtacatggcggcgagcgttttgccagtagcgtgaagattactgacgaagtcttaaagaccatcgagacgttgtcgttcttagctccgttacacaatccagcgaacattatgggtatcaagagcagcatgaaagtgttaccgggtgtgcctcaagttgccgtctttgatacagcgttccaccagaagatgccggagaaagcctatttgtacgcaatcccctatgagtactacgagaaatataaaattcgccgctatgggtttcatggaacctcacatcgttatgtgagtaaacgtgctgcggaaattatgggcaaaccgtacgatcagctcaagatcattaccgttcacgtgggtaacggcgcatcagttgcggcggtgaagaatggcgtatctgttgacacttccatgggtttcacaccacttgaaggtcttgtcatgggcacgcgcagcggcgatattgatccggccatcgtggaatttcttgagaaagaagaaggattgtcggccaaagaagtcgtcaacatcctcaacaagaaatctggtgtgtatgggctcaccaaaggctttagtagtgacatgcgtgacattgtggataatgctattgaaggtgatcctgtatgccgccttgcattagatgtgtacacttatcgtatcgcgaaatatattggcgcatacgctgcggccatgaacggtgttgacgcgatcgtctttaccgcaggagttggcgaaaatagcccgattatgcgcgaagaaattattgagaactacttgggctacttagggatcaagatcgataaagaagccaatgacttcaaaggtgaggagaagatcatttcaacgcccgattccaaagtgattgcgatggtagttccgaccaacgaggagctcatgatcgccaaagacacgaaagaaatcattgagaaagggttggacgagcttaagatc

SEQ ID NO: 740 - protein, 417 aa, synthetic construct
  REGION 1..417: note = variant of acetate kinase from Marinitoga sp. 38H-ov
MHHHHHHGGSGMKVLVINSGSSSIKYQLLDMTNEKVLAKGLVERIGIDGSRIVHKVNGEKHVLEHEIKNHEIGLKLVLDLLTDEKYGVLKDLKEIDAVGHRVVHGGERFASSVKITDEVLKTIETLSFLAPLHNPANIMGIKSSMKVLPGVPQVAVFDTAFHQKMPEKAYLYAIPYEYYEKYKIRRYGFHGTSHRYVSKRAAEIMGKPYDQLKIITVHVGNGASVAAVKNGVSVDTSMGFTPLEGLVMGTRSGDIDPAIVEFLEKEEGLSAKEVVNILNKKSGVYGLTKGFSSDMRDIVDNAIEGDPVCRLALDVYTYRIAKYIGAYAAAMNGVDAIVFTAGVGENSPIMREEIIENYLGYLGIKIDKEANDFKGEEKIISTPDSKVIAMVVPTNEELMIAKDTKEIIEKGLDELKI

SEQ ID NO: 741 - DNA, 1251 bp, synthetic construct
  misc_feature 1..1251: note = variant of acetate kinase from Marinitoga sp. 38H-ov
  source 1..1251: mol_type = other DNA
atgcaccatcatcatcatcatggcggtagcggcatgaaagttctggtgattaattctggtagctcctccatcaaatatcagctcctcgatatgaccaacgaaaaggtattagcgaaaggcttggtcgagcgcattggcatcgacggttcgcgtatcgtgcataaagttaacggcgaaaaacacgtgctggaacatgagattaagaatcacgaaattggacttaaattggtcctggatcttcttacggacgaaaaatacggtgtgttgaaggatctcaaagaaatcgatgcagttgggcatcgcgtagtacatggcggcgagcgttttgccagtagcgtgaagattactgacgaagtcttaaagaccatcgagacgttgtcgttcttagctccgttacacaatccagcgaacattatgggtatcaagagcagcatgaaagtgttaccgggtgtgcctcaagttgccgtctttgatacagcgttccaccagaagatgccggagaaagcctatttgtacgcaatcccctatgagtactacgagaaatataaaattcgccgctatgggtttcatggaacctcacatcgttatgtgagtaaacgtgctgcggaaattatgggcaaaccgtacgatcagctcaagatcattaccgttcacgtgggtaacggcgcatcagttgcggcggtgaagaatggcgtatctgttgacacttccatgggtttcacaccacttgaaggtcttgtcatgggcacgcgcagcggcgatattgatccggccatcgtggaatttcttgagaaagaagaaggattgtcggccaaagaagtcgtcaacatcctcaacaagaaatctggtgtgtatgggctcaccaaaggctttagtagtgacatgcgtgacattgtggataatgctattgaaggtgatcctgtatgccgccttgcattagatgtgtacggttatcgtatcgcgaaatatattggcgcatacgctgcggccatgaacggtgttgacgcgatcgtctttaccgcaggagttggcgaaaatagcccgattatgcgcgaagaaattattgagaactacttgggctacttagggatcaagatcgataaagaagccaatgacttcaaaggtgaggagaagatcatttcaacgcccgattccaaagtgattgcgatggtagttccgaccaacgaggagctcatgatcgccaaagacacgaaagaaatcattgagaaagggttggacgagcttaagatc

SEQ ID NO: 742 - protein, 417 aa, synthetic construct
  REGION 1..417: note = variant of acetate kinase from Marinitoga sp. 38H-ov
MHHHHHHGGSGMKVLVINSGSSSIKYQLLDMTNEKVLAKGLVERIGIDGSRIVHKVNGEKHVLEHEIKNHEIGLKLVLDLLTDEKYGVLKDLKEIDAVGHRVVHGGERFASSVKITDEVLKTIETLSFLAPLHNPANIMGIKSSMKVLPGVPQVAVFDTAFHQKMPEKAYLYAIPYEYYEKYKIRRYGFHGTSHRYVSKRAAEIMGKPYDQLKIITVHVGNGASVAAVKNGVSVDTSMGFTPLEGLVMGTRSGDIDPAIVEFLEKEEGLSAKEVVNILNKKSGVYGLTKGFSSDMRDIVDNAIEGDPVCRLALDVYGYRIAKYIGAYAAAMNGVDAIVFTAGVGENSPIMREEIIENYLGYLGIKIDKEANDFKGEEKIISTPDSKVIAMVVPTNEELMIAKDTKEIIEKGLDELKI

SEQ ID NO: 743 - DNA, 1251 bp, synthetic construct
  misc_feature 1..1251: note = variant of acetate kinase from Marinitoga sp. 38H-ov
  source 1..1251: mol_type = other DNA
atgcaccatcatcatcatcatggcggtagcggcatgaaagttctggtgattaattctggtagctcctccatcaaatatcagctcctcgatatgaccaacgaaaaggtattagcgaaaggcttggtcgagcgcattggcatcgacggttcgcgtatcgtgcataaagttaacggcgaaaaacacgtgctggaacatgagattaagaatcacgaaattggacttaaattggtcctggatcttcttacggacgaaaaatacggtgtgttgaaggatctcaaagaaatcgatgcagttgggcatcgcgtagtacatggcggcgagcgttttgccagtagcgtgaagattactgacgaagtcttaaagaccatcgagacgttgtcgttcttagctccgttacacaatccagcgaacattatgggtatcaagagcagcatgaaagtgttaccgggtgtgcctcaagttgccgtctttgatacagcgttccaccagaagatgccggagaaagcctatttgtacgcaatcccctatgagtactacgagaaatataaaattcgccgctatgggtttcatggaacctcacatcgttatgtgagtaaacgtgctgcggaaattatgggcaaaccgtacgatcagctcaagatcattaccgttcacgtgggtaacggcgcatcagttgcggcggtgaagaatggcgtatctgttgacacttccatgggtttcacaccacttgaaggtcttgtcatgggcacgcgcagcggcgatattgatccggccatcgtggaatttcttgagaaagaagaaggattgtcagccaaagaagtcgtcaacatcctcaacaagaaatctggtgtgtatgggctcaccaaaggctttagtagtgacatgcgtgacattgtggataatgctattgaaggtgatcctgtatgcttgcttgcattagatgtgtacgaatatcgtatcgcgaaatatattggcgcatacgctgcggccatgaacggtgttgacgcgatcgtctttaccgcaggagttggcgaaaatagcccgattatgcgcgaagaaattattgagaactacttgggctacttagggatcaagatcgataaagaagccaatgacttcaaaggtgaggagaagatcatttcaacgcccgattccaaagtgattgcgatggtagttccgaccaacgaggagctcatgatcgccaaagacacgaaagaaatcattgagaaagggttggacgagcttaagatc

SEQ ID NO: 744 - protein, 417 aa, synthetic construct
  REGION 1..417: note = variant of acetate kinase from Marinitoga sp. 38H-ov
MHHHHHHGGSGMKVLVINSGSSSIKYQLLDMTNEKVLAKGLVERIGIDGSRIVHKVNGEKHVLEHEIKNHEIGLKLVLDLLTDEKYGVLKDLKEIDAVGHRVVHGGERFASSVKITDEVLKTIETLSFLAPLHNPANIMGIKSSMKVLPGVPQVAVFDTAFHQKMPEKAYLYAIPYEYYEKYKIRRYGFHGTSHRYVSKRAAEIMGKPYDQLKIITVHVGNGASVAAVKNGVSVDTSMGFTPLEGLVMGTRSGDIDPAIVEFLEKEEGLSAKEVVNILNKKSGVYGLTKGFSSDMRDIVDNAIEGDPVCLLALDVYEYRIAKYIGAYAAAMNGVDAIVFTAGVGENSPIMREEIIENYLGYLGIKIDKEANDFKGEEKIISTPDSKVIAMVVPTNEELMIAKDTKEIIEKGLDELKI

SEQ ID NO: 745 - DNA, 1251 bp, synthetic construct; identical to SEQ ID NO: 397
  misc_feature 1..1251: note = variant of acetate kinase from Marinitoga sp. 38H-ov
  source 1..1251: mol_type = other DNA

SEQ ID NO: 746 - protein, 417 aa, synthetic construct; identical to SEQ ID NO: 398
  REGION 1..417: note = variant of acetate kinase from Marinitoga sp. 38H-ov

SEQ ID NO: 747 - DNA, 1251 bp, synthetic construct
  misc_feature 1..1251: note = variant of acetate kinase from Marinitoga sp. 38H-ov
  source 1..1251: mol_type = other DNA
atgcaccatcatcatcatcatggcggtagcggcatgaaagttctggtgattaattctggtagctcctccatcaaatatcagctcctcgatatgaccaacgaaaaggtattagcgaaaggcttggtcgagcgcattggcatcgacggttcgcgtatcgtgcataaagttaacggcgaaaaacacgtgctggaacatgagattaagaatcacgaaattggacttaaattggtcctggatcttcttacggacgaaaaatacggtgtgttgaaggatctcaaagaaatcgatgcagttgggcatcgcgtagtacatggcggcgagcgttttgccagtagcgtgaagattactgacgaagtcttaaagaccatcgagacgttgtcgttcttagctccgttacacaatccagcgaacattatgggtatcaagagcagcatgaaagtgttaccgggtgtgcctcaagttgccgtctttgatacagcgttccaccagaagatgccggagaaagcctatttgtacgcaatcccctatgagtactacgagaaatataaaattcgccgctatgggtttcatggaacctcacatcgttatgtgagtaaacgtgctgcggaaattatgggcaaaccgtacgatcagctcaagatcattaccgttcacgtgggtaacggcgcatcagttgcggcggtgaagaatggcgtatctgttgacacttccatgggtttcacaccacttgaaggtcttgtcatgggcacgcgcagcggcgatattgatccggccatcgtggaatttcttgagaaagaagaaggattgtcggccaaagaagtcgtcaacatcctcaacaagaaatctggtgtgtatgggctcaccaaaggctttagtagtgacatgcgtgacattgtgtcgaatgctattgaaggtgatcctgtatgccgccttgcattagatgtgtacgaatatcgtatcgcgaaatatattggcgcatacgctgcggccatgaacggtgttgacgcgatcgtctttaccgcaggagttggcgaaaatagcccgattatgcgcgaagaaattattgagaactacttgggctacttagggatcaagatcgataaagaagccaatgacttcaaaggtgaggagaagatcatttcaacgcccgattccaaagtgattgcgatggtagttccgaccaacgaggagctcatgatcgccaaagacacgaaagaaatcattgagaaagggttggacgagcttaagatc

SEQ ID NO: 748 - protein, 417 aa, synthetic construct
  REGION 1..417: note = variant of acetate kinase from Marinitoga sp. 38H-ov
MHHHHHHGGSGMKVLVINSGSSSIKYQLLDMTNEKVLAKGLVERIGIDGSRIVHKVNGEKHVLEHEIKNHEIGLKLVLDLLTDEKYGVLKDLKEIDAVGHRVVHGGERFASSVKITDEVLKTIETLSFLAPLHNPANIMGIKSSMKVLPGVPQVAVFDTAFHQKMPEKAYLYAIPYEYYEKYKIRRYGFHGTSHRYVSKRAAEIMGKPYDQLKIITVHVGNGASVAAVKNGVSVDTSMGFTPLEGLVMGTRSGDIDPAIVEFLEKEEGLSAKEVVNILNKKSGVYGLTKGFSSDMRDIVSNAIEGDPVCRLALDVYEYRIAKYIGAYAAAMNGVDAIVFTAGVGENSPIMREEIIENYLGYLGIKIDKEANDFKGEEKIISTPDSKVIAMVVPTNEELMIAKDTKEIIEKGLDELKI

SEQ ID NO: 749 - DNA, 1251 bp, synthetic construct
  misc_feature 1..1251: note = variant of acetate kinase from Marinitoga sp. 38H-ov
  source 1..1251: mol_type = other DNA
atgcaccatcatcatcatcatggcggtagcggcatgaaagttctggtgattaattctggtagctcctccatcaaatatcagctcctcgatatgaccaacgaaaaggtattagcgaaaggcttggtcgagcgcattggcatcgacggttcgcgtatcgtgcataaagttaacggcgaaaaacacgtgctggaacatgagattaagaatcacgaaattggacttaaattggtcctggatcttcttacggacgaaaaatacggtgtgttgaaggatctcaaagaaatcgatgcagttgggcatcgcgtagtacatggcggcgagcgttttgccagtagcgtgaagattactgacgaagtcttaaagaccatcgagacgttgtcgttcttagctccgttacacaatccagcgaacattatgggtatcaagagcagcatgaaagtgttaccgggtgtgcctcaagttgccgtctttgatacagcgttccaccagaagatgccggagaaagcctatttgtacgcaatcccctatgagtactacgagaaatataaaattcgccgctatgggtttcatggaacctcacatcgttatgtgagtaaacgtgctgcggaaattatgggcaaaccgtacgatcagctcaagatcattaccgttcacgtgggtaacggcgcatcagttgcggcggtgaagaatggcgtatctgttgacacttccatgggtttcacaccacttgaaggtcttgtcatgggcacgcgcagcggcgatattgatccggccatcgtggaatttcttgagaaagaagaaggattgtcggccaaagaagtcgtcaacatcctcaacaagaaatctggtgtgtatgggctcaccaaaggctttagtagtgacatgcgtgacattgtggataatgctattccgggtgatcctgtatgccgccttgcattagatgtgtacgaatatcgtatcgcgaaatatattggcgcatacgctgcggccatgaacggtgttgacgcgatcgtctttaccgcaggagttggcgaaaatagcccgattatgcgcgaagaaattattgagaactacttgggctacttagggatcaagatcgataaagaagccaatgacttcaaaggtgaggagaagatcatttcaacgcccgattccaaagtgattgcgatggtagttccgaccaacgaggagctcatgatcgccaaagacacgaaagaaatcattgagaaagggttggacgagcttaagatc

SEQ ID NO: 750 - protein, 417 aa, synthetic construct
  REGION 1..417: note = variant of acetate kinase from Marinitoga sp. 38H-ov
MHHHHHHGGSGMKVLVINSGSSSIKYQLLDMTNEKVLAKGLVERIGIDGSRIVHKVNGEKHVLEHEIKNHEIGLKLVLDLLTDEKYGVLKDLKEIDAVGHRVVHGGERFASSVKITDEVLKTIETLSFLAPLHNPANIMGIKSSMKVLPGVPQVAVFDTAFHQKMPEKAYLYAIPYEYYEKYKIRRYGFHGTSHRYVSKRAAEIMGKPYDQLKIITVHVGNGASVAAVKNGVSVDTSMGFTPLEGLVMGTRSGDIDPAIVEFLEKEEGLSAKEVVNILNKKSGVYGLTKGFSSDMRDIVDNAIPGDPVCRLALDVYEYRIAKYIGAYAAAMNGVDAIVFTAGVGENSPIMREEIIENYLGYLGIKIDKEANDFKGEEKIISTPDSKVIAMVVPTNEELMIAKDTKEIIEKGLDELKI

SEQ ID NO: 751 - DNA, 1251 bp, synthetic construct
  misc_feature 1..1251: note = variant of acetate kinase from Marinitoga sp. 38H-ov
  source 1..1251: mol_type = other DNA
atgcaccatcatcatcatcatggcggtagcggcatgaaagttctggtgattaattctggtagctcctccatcaaatatcagctcctcgatatgaccaacgaaaaggtattagcgaaaggcttggtcgagcgcattggcatcgacggttcgcgtatcgtgcataaagttaacggcgaaaaacacgtgctggaacatgagattaagaatcacgaaattggacttaaattggtcctggatcttcttacggacgaaaaatacggtgtgttgaaggatctcaaagaaatcgatgcagttgggcatcgcgtagtacatggcggcgagcgttttgccagtagcgtgaagattactgacgaagtcttaaagaccatcgagacgttgtcgttcttagctccgttacacaatccagcgaacattatgggtatcaagagcagcatgaaagtgttaccgggtgtgcctcaagttgccgtctttgatacagcgttccaccagaagatgccggagaaagcctatttgtacgcaatcccctatgagtactacgagaaatataaaattcgccgctatgggtttcatggaacctcacatcgttatgtgagtaaacgtgctgcggaaattatgggcaaaccgtacgatcagctcaagatcattaccgttcacgtgggtaacggcgcatcagttgcggcggtgaagaatggcgtatctgttgacacttccatgggtttcacaccacttgaaggtcttgtcatgggcacgcgcagcggcgatattgatccggccatcgtggaatttcttgagaaagaagaaggattgtcggccaaagaagtcgtcaacatcctcaacaagaaatctggtgtgtatgggctcaccaaaggctttagtagtgacatgcgtgacattgtggataatgctattgaaggtgatcctgtatgccgccttgcattagatgtgtacgaatatcgtatcgcgaaatatattggcgcatacgctgcggccatgaacggtgttgacgcgatcgtctttaccgcaggagttggcgaaaatagcccgattatgcgcgaagaaattattgagaactacttgggctacttagggatcaagatcgataaagaagccaattcgttcaaaggtgaggagaagatcatttcaacgcccgattccaaagtgattgcgatggtagttccgaccaacgaggagctcatgatcgccaaagacacgaaagaaatcattgagaaagggttggacgagcttaagatc

SEQ ID NO: 752 - protein, 417 aa, synthetic construct
  REGION 1..417: note = variant of acetate kinase from Marinitoga sp. 38H-ov
MHHHHHHGGSGMKVLVINSGSSSIKYQLLDMTNEKVLAKGLVERIGIDGSRIVHKVNGEKHVLEHEIKNHEIGLKLVLDLLTDEKYGVLKDLKEIDAVGHRVVHGGERFASSVKITDEVLKTIETLSFLAPLHNPANIMGIKSSMKVLPGVPQVAVFDTAFHQKMPEKAYLYAIPYEYYEKYKIRRYGFHGTSHRYVSKRAAEIMGKPYDQLKIITVHVGNGASVAAVKNGVSVDTSMGFTPLEGLVMGTRSGDIDPAIVEFLEKEEGLSAKEVVNILNKKSGVYGLTKGFSSDMRDIVDNAIEGDPVCRLALDVYEYRIAKYIGAYAAAMNGVDAIVFTAGVGENSPIMREEIIENYLGYLGIKIDKEANSFKGEEKIISTPDSKVIAMVVPTNEELMIAKDTKEIIEKGLDELKI

SEQ ID NO: 753 - DNA, 1251 bp, synthetic construct
  misc_feature 1..1251: note = variant of acetate kinase from Marinitoga sp. 38H-ov
  source 1..1251: mol_type = other DNA
atgcaccatcatcatcatcatggcggtagcggcatgaaagttctggtgattaattctggtagctcctccatcaaatatcagctcctcgatatgaccaacgaaaaggtattagcgaaaggcttggtcgagcgcattggcatcgacggttcgcgtatcgtgcataaagttaacggcgaaaaacacgtgctggaacatgagattaagaatcacgaaattggacttaaattggtcctggatcttcttacggacgaaaaatacggtgtgttgaaggatctcaaagaaatcgatgcagttgggcatcgcgtagtacatggcggcgagcgttttgccagtagcgtgaagattactgacgaagtcttaaagaccatcgagacgttgtcgttcttagctccgttacacaatccagcgaacattatgggtatcaagagcagcatgaaagtgttaccgggtgtgcctcaagttgccgtctttgatacagcgttccaccagaagatgccggagaaagcctatttgtacgcaatcccctatgagtactacgagaaatataaaattcgccgctatgggtttcatggaacctcacatcgttatgtgagtaaacgtgctgcggaaattatgggcaaaccgtacgatcagctcaagatcattaccgttcacgtgggtaacggcgcatcagttgcggcggtgaagaatggcgtatctgttgacacttccatgggtttcacaccacttgaaggtcttgtcatgggcacgcgcagcggcgatattgatccggccatcgtggaatttcttgagaaagaagaaggattgtcggccaaagaagtcgtcaacatcctcaacaagaaatctggtgtgtatgggctcaccaaaggctttagtagtgacatgcgtgacattgtggataatgctattgaaggtgatcctgtatgccgccttgcattagatgtgtacttgtatcgtatcgcgaaatatattggcgcatacgctgcggccatgaacggtgttgacgcgatcgtctttaccgcaggagttggcgaaaatagcccgattatgcgcgaagaaattattgagaactacttgggctacttagggatcaagatcgataaagaagccaatgacttcaaaggtgaggagaagatcatttcaacgcccgattccaaagtgattgcgatggtagttccgaccaacgaggagctcatgatcgccaaagacacgaaagaaatcattgagaaagggttggacgagcttaagatc

SEQ ID NO: 754 - protein, 417 aa, synthetic construct
  REGION 1..417: note = variant of acetate kinase from Marinitoga sp. 38H-ov
MHHHHHHGGSGMKVLVINSGSSSIKYQLLDMTNEKVLAKGLVERIGIDGSRIVHKVNGEKHVLEHEIKNHEIGLKLVLDLLTDEKYGVLKDLKEIDAVGHRVVHGGERFASSVKITDEVLKTIETLSFLAPLHNPANIMGIKSSMKVLPGVPQVAVFDTAFHQKMPEKAYLYAIPYEYYEKYKIRRYGFHGTSHRYVSKRAAEIMGKPYDQLKIITVHVGNGASVAAVKNGVSVDTSMGFTPLEGLVMGTRSGDIDPAIVEFLEKEEGLSAKEVVNILNKKSGVYGLTKGFSSDMRDIVDNAIEGDPVCRLALDVYLYRIAKYIGAYAAAMNGVDAIVFTAGVGENSPIMREEIIENYLGYLGIKIDKEANDFKGEEKIISTPDSKVIAMVVPTNEELMIAKDTKEIIEKGLDELKI

SEQ ID NO: 755 - DNA, 1251 bp, synthetic construct
  misc_feature 1..1251: note = variant of acetate kinase from Marinitoga sp. 38H-ov
  source 1..1251: mol_type = other DNA
atgcaccatcatcatcatcatggcggtagcggcatgaaagttctggtgattaattctggtagctcctccatcaaatatcagctcctcgatatgaccaacgaaaaggtattagcgaaaggcttggtcgagcgcattggcatcgacggttcgcgtatcgtgcataaagttaacggcgaaaaacacgtgctggaacatgagattaagaatcacgaaattggacttaaattggtcctggatcttcttacggacgaaaaatacggtgtgttgaaggatctcaaagaaatcgatgcagttgggcatcgcgtagtacatggcggcgagcgttttgccagtagcgtgaagattactgacgaagtcttaaagaccatcgagacgttgtcgttcttagctccgttacacaatccagcgaacattatgggtatcaagagcagcatgaaagtgttaccgggtgtgcctcaagttgccgtctttgatacagcgttccaccagaagatgccggagaaagcctatttgtacgcaatcccctatgagtactacgagaaatataaaattcgccgctatgggtttcatggaacctcacatcgttatgtgagtaaacgtgctgcggaaattatgggcaaaccgtacgatcagctcaagatcattaccgttcacgtgggtaacggcgcatcagttgcggcggtgaagaatggcgtatctgttgacacttccatgggtttcacaccacttgaaggtcttgtcatgggcacgcgcagcggcgatattgatccggccatcgtggaatttcttgagaaagaagaaggattgtcggccaaagaagtcgtcaacatcctcaacaagaaatctggtgtgtatgggctcaccaaaggctttagtagtgacatgcgtgacattgtggattttgctattgaaggtgatcctgtatgccgccttgcattagatgtgtacgaatatcgtatcgcgaaatatattggcgcatacgctgcggccatgaacggtgttgacgcgatcgtctttaccgcaggagttggcgaaaatagcccgattatgcgcgaagaaattattgagaactacttgggctacttagggatcaagatcgataaagaagccaatgacttcaaaggtgaggagaagatcatttcaacgcccgattccaaagtgattgcgatggtagttccgaccaacgaggagctcatgatcgccaaagacacgaaagaaatcattgagaaagggttggacgagcttaagatc

SEQ ID NO: 756 - protein, 417 aa, synthetic construct
  REGION 1..417: note = variant of acetate kinase from Marinitoga sp. 38H-ov
MHHHHHHGGSGMKVLVINSGSSSIKYQLLDMTNEKVLAKGLVERIGIDGSRIVHKVNGEKHVLEHEIKNHEIGLKLVLDLLTDEKYGVLKDLKEIDAVGHRVVHGGERFASSVKITDEVLKTIETLSFLAPLHNPANIMGIKSSMKVLPGVPQVAVFDTAFHQKMPEKAYLYAIPYEYYEKYKIRRYGFHGTSHRYVSKRAAEIMGKPYDQLKIITVHVGNGASVAAVKNGVSVDTSMGFTPLEGLVMGTRSGDIDPAIVEFLEKEEGLSAKEVVNILNKKSGVYGLTKGFSSDMRDIVDFAIEGDPVCRLALDVYEYRIAKYIGAYAAAMNGVDAIVFTAGVGENSPIMREEIIENYLGYLGIKIDKEANDFKGEEKIISTPDSKVIAMVVPTNEELMIAKDTKEIIEKGLDELKI

SEQ ID NO: 757 - DNA, 1251 bp, synthetic construct
  misc_feature 1..1251: note = variant of acetate kinase from Marinitoga sp. 38H-ov
  source 1..1251: mol_type = other DNA
atgcaccatcatcatcatcatggcggtagcggcatgaaagttctggtgattaattctggtagctcctccatcaaatatcagctcctcgatatgaccaacgaaaaggtattagcgaaaggcttggtcgagcgcattggcatcgacggttcgcgtatcgtgcataaagttaacggcgaaaaacacgtgctggaacatgagattaagaatcacgaaattggacttaaattggtcctggatcttcttacggacgaaaaatacggtgtgttgaaggatctcaaagaaatcgatgcagttgggcatcgcgtagtacatggcggcgagcgttttgccagtagcgtgaagattactgacgaagtcttaaagaccatcgagacgttgtcgttcttagctccgttacacaatccagcgaacattatgggtatcaagagcagcatgaaagtgttaccgggtgtgcctcaagttgccgtctttgatacagcgttccaccagaagatgccggagaaagcctatttgtacgcaatcccctatgagtactacgagaaatataaaattcgccgctatgggtttcatggaacctcacatcgttatgtgagtaaacgtgctgcggaaattatgggcaaaccgtacgatcagctcaagatcattaccgttcacgtgggtaacggcgcatcagttgcggcggtgaagaatggcgtatctgttgacacttccatgggtttcacaccacttgaaggtcttgtcatgggcacgcgcagcggcgatattgatccggccatcgtggaatttcttgagaaagaagaaggattgtcggccaaagaagtcgtcaacatcctcaacaagaaatctggtgtgtatgggctcaccaaaggctttagtagtgacatgcgtgacattgtggatgatgctattgaaggtgatcctgtatgccgccttgcattagatgtgtacgaatatcgtatcgcgaaatatattggcgcatacgctgcggccatgaacggtgttgacgcgatcgtctttaccgcaggagttggcgaaaatagcccgattatgcgcgaagaaattattgagaactacttgggctacttagggatcaagatcgataaagaagccaatgacttcaaaggtgaggagaagatcatttcaacgcccgattccaaagtgattgcgatggtagttccgaccaacgaggagctcatgatcgccaaagacacgaaagaaatcattgagaaagggttggacgagcttaagatc

SEQ ID NO: 758 - protein, 417 aa, synthetic construct
  REGION 1..417: note = variant of acetate kinase from Marinitoga sp. 38H-ov
MHHHHHHGGSGMKVLVINSGSSSIKYQLLDMTNEKVLAKGLVERIGIDGSRIVHKVNGEKHVLEHEIKNHEIGLKLVLDLLTDEKYGVLKDLKEIDAVGHRVVHGGERFASSVKITDEVLKTIETLSFLAPLHNPANIMGIKSSMKVLPGVPQVAVFDTAFHQKMPEKAYLYAIPYEYYEKYKIRRYGFHGTSHRYVSKRAAEIMGKPYDQLKIITVHVGNGASVAAVKNGVSVDTSMGFTPLEGLVMGTRSGDIDPAIVEFLEKEEGLSAKEVVNILNKKSGVYGLTKGFSSDMRDIVDDAIEGDPVCRLALDVYEYRIAKYIGAYAAAMNGVDAIVFTAGVGENSPIMREEIIENYLGYLGIKIDKEANDFKGEEKIISTPDSKVIAMVVPTNEELMIAKDTKEIIEKGLDELKI

SEQ ID NO: 759 - DNA, 1251 bp, synthetic construct
  misc_feature 1..1251: note = variant of acetate kinase from Marinitoga sp. 38H-ov
  source 1..1251: mol_type = other DNA
atgcaccatcatcatcatcatggcggtagcggcatgaaagttctggtgattaattctggtagctcctccatcaaatatcagctcctcgatatgaccaacgaaaaggtattagcgaaaggcttggtcgagcgcattggcatcgacggttcgcgtatcgtgcataaagttaacggcgaaaaacacgtgctggaacatgagattaagaatcacgaaattggacttaaattggtcctggatcttcttacggacgaaaaatacggtgtgttgaaggatctcaaagaaatcgatgcagttgggcatcgcgtagtacatggcggcgagcgttttgccagtagcgtgaagattactgacgaagtcttaaagaccatcgagacgttgtcgttcttagctccgttacacaatccagcgaacattatgggtatcaagagcagcatgaaagtgttaccgggtgtgcctcaagttgccgtctttgatacagcgttccaccagaagatgccggagaaagcctatttgtacgcaatcccctatgagtactacgagaaatataaaattcgccgctatgggtttcatggaacctcacatcgttatgtgagtaaacgtgctgcggaaattatgggcaaaccgtacgatcagctcaagatcattaccgttcacgtgggtaacggcgcatcagttgcggcggtgaagaatggcgtatctgttgacacttccatgggtttcacaccacttgaaggtcttgtcatgggcacgcgcagcggcgatattgatccggccatcgtggaatttcttgagaaagaagaaggattgtcggccaaagaagtcgtcaacatcctcaacaagaaatctggtgtgtatgggctcaccaaaggctttagtagtgacatgcgtgacattgtggataatgctattgaaggtgatcctgtatgccgccttgcattagatgtgtacgaatatcgtatcgcgaaatatattggcgcatacgctgcggccatgaacggtgttgacgcgatcgtctttaccgcaggagttggcgaaaatagcccgattatgcgctgggaaattattgagaactacttgggctacttagggatcaagatcgataaagaagccaatgacttcaaaggtgaggagaagatcatttcaacgcccgattccaaagtgattgcgatggtagttccgaccaacgaggagctcatgatcgccaaagacacgaaagaaatcattgagaaagggttggacgagcttaagatc

SEQ ID NO: 760 - protein, 417 aa, synthetic construct
  REGION 1..417: note = variant of acetate kinase from Marinitoga sp. 38H-ov
MHHHHHHGGSGMKVLVINSGSSSIKYQLLDMTNEKVLAKGLVERIGIDGSRIVHKVNGEKHVLEHEIKNHEIGLKLVLDLLTDEKYGVLKDLKEIDAVGHRVVHGGERFASSVKITDEVLKTIETLSFLAPLHNPANIMGIKSSMKVLPGVPQVAVFDTAFHQKMPEKAYLYAIPYEYYEKYKIRRYGFHGTSHRYVSKRAAEIMGKPYDQLKIITVHVGNGASVAAVKNGVSVDTSMGFTPLEGLVMGTRSGDIDPAIVEFLEKEEGLSAKEVVNILNKKSGVYGLTKGFSSDMRDIVDNAIEGDPVCRLALDVYEYRIAKYIGAYAAAMNGVDAIVFTAGVGENSPIMRWEIIENYLGYLGIKIDKEANDFKGEEKIISTPDSKVIAMVVPTNEELMIAKDTKEIIEKGLDELKI

SEQ ID NO: 761 - DNA, 1251 bp, synthetic construct
  misc_feature 1..1251: note = variant of acetate kinase from Marinitoga sp. 38H-ov
  source 1..1251: mol_type = other DNA
atgcaccatcatcatcatcatggcggtagcggcatgaaagttctggtgattaattctggtagctcctccatcaaatatcagctcctcgatatgaccaacgaaaaggtattagcgaaaggcttggtcgagcgcattggcatcgacggttcgcgtatcgtgcataaagttaacggcgaaaaacacgtgctggaacatgagattaagaatcacgaaattggacttaaattggtcctggatcttcttacggacgaaaaatacggtgtgttgaaggatctcaaagaaatcgatgcagttgggcatcgcgtagtacatggcggcgagcgttttgccagtagcgtgaagattactgacgaagtcttaaagaccatcgagacgttgtcgttcttagctccgttacacaatccagcgaacattatgggtatcaagagcagcatgaaagtgttaccgggtgtgcctcaagttgccgtctttgatacagcgttccaccagaagatgccggagaaagcctatttgtacgcaatcccctatgagtactacgagaaatataaaattcgccgctatgggtttcatggaacctcacatcgttatgtgagtaaacgtgctgcggaaattatgggcaaaccgtacgatcagctcaagatcattaccgttcacgtgggtaacggcgcatcagttgcggcggtgaagaatggcgtatctgttgacacttccatgggtttcacaccacttgaaggtcttgtcatgggcacgcgcagcggcgatattgatccggccatcgtggaatttcttgagaaagaagaaggattgtcggccaaagaagtcgtcaacatcctcaacaagaaatctggtgtgtatgggctcaccaaaggccggagtagtgacatgcgtgacattgtggataatgctattgaaggtgatcctgtatgccgccttgcattagatgtgtacgaatatcgtatcgcgaaatatattggcgcatacgctgcggccatgaacggtgttgacgcgatcgtctttaccgcaggagttggcgaaaatagcccgattatgcgcgaagaaattattgagaactacttgggctacttagggatcaagatcgataaagaagccaatgacttcaaaggtgaggagaagatcatttcaacgcccgattccaaagtgattgcgatggtagttccgaccaacgaggagctcatgatcgccaaagacacgaaagaaatcattgagaaagggttggacgagcttaagatc

SEQ ID NO: 762 - protein, 417 aa, synthetic construct
  REGION 1..417: note = variant of acetate kinase from Marinitoga sp. 38H-ov
MHHHHHHGGSGMKVLVINSGSSSIKYQLLDMTNEKVLAKGLVERIGIDGSRIVHKVNGEKHVLEHEIKNHEIGLKLVLDLLTDEKYGVLKDLKEIDAVGHRVVHGGERFASSVKITDEVLKTIETLSFLAPLHNPANIMGIKSSMKVLPGVPQVAVFDTAFHQKMPEKAYLYAIPYEYYEKYKIRRYGFHGTSHRYVSKRAAEIMGKPYDQLKIITVHVGNGASVAAVKNGVSVDTSMGFTPLEGLVMGTRSGDIDPAIVEFLEKEEGLSAKEVVNILNKKSGVYGLTKGRSSDMRDIVDNAIEGDPVCRLALDVYEYRIAKYIGAYAAAMNGVDAIVFTAGVGENSPIMREEIIENYLGYLGIKIDKEANDFKGEEKIISTPDSKVIAMVVPTNEELMIAKDTKEIIEKGLDELKI

SEQ ID NO: 763 - DNA, 1251 bp, synthetic construct
  misc_feature 1..1251: note = variant of acetate kinase from Marinitoga sp. 38H-ov
  source 1..1251: mol_type = other DNA
atgcaccatcatcatcatcatggcggtagcggcatgaaagttctggtgattaattctggtagctcctccatcaaatatcagctcctcgatatgaccaacgaaaaggtattagcgaaaggcttggtcgagcgcattggcatcgacggttcgcgtatcgtgcataaagttaacggcgaaaaacacgtgctggaacatgagattaagaatcacgaaattggacttaaattggtcctggatcttcttacggacgaaaaatacggtgtgttgaaggatctcaaagaaatcgatgcagttgggcatcgcgtagtacatggcggcgagcgttttgccagtagcgtgaagattactgacgaagtcttaaagaccatcgagacgttgtcgttcttagctccgttacacaatccagcgaacattatgggtatcaagagcagcatgaaagtgttaccgggtgtgcctcaagttgccgtctttgatacagcgttccaccagaagatgccggagaaagcctatttgtacgcaatcccctatgagtactacgagaaatataaaattcgccgctatgggtttcatggaacctcacatcgttatgtgagtaaacgtgctgcggaaattatgggcaaaccgtacgatcagctcaagatcattaccgttcacgtgggtaacggcgcatcagttgcggcggtgaagaatggcgtatctgttgacacttccatgggtttcacaccacttgaaggtcttgtcatgggcacgcgcagcggcgatattgatccggccatcgtggaatttcttgagaaagaagaaggattgtcggccaaagaagtcgtcaacatcctcaacaagaaatctggtgtgtatgggctcaccaaaggctttagtagtgacatgcgtgacattgtggataatgctattgaaggtgatcctgtatgccgccttgcattagatgtgtactcttatcgtatcgcgaaatatattggcgcatacgctgcggccatgaacggtgttgacgcgatcgtctttaccgcaggagttggcgaaaatagcccgattatgcgcgaagaaattattgagaactacttgggctacttagggatcaagatcgataaagaagccaatgacttcaaaggtgaggagaagatcatttcaacgcccgattccaaagtgattgcgatggtagttccgaccaacgaggagctcatgatcgccaaagacacgaaagaaatcattgagaaagggttggacgagcttaagatc

SEQ ID NO: 764 - protein, 417 aa, synthetic construct
  REGION 1..417: note = variant of acetate kinase from Marinitoga sp. 38H-ov
MHHHHHHGGSGMKVLVINSGSSSIKYQLLDMTNEKVLAKGLVERIGIDGSRIVHKVNGEKHVLEHEIKNHEIGLKLVLDLLTDEKYGVLKDLKEIDAVGHRVVHGGERFASSVKITDEVLKTIETLSFLAPLHNPANIMGIKSSMKVLPGVPQVAVFDTAFHQKMPEKAYLYAIPYEYYEKYKIRRYGFHGTSHRYVSKRAAEIMGKPYDQLKIITVHVGNGASVAAVKNGVSVDTSMGFTPLEGLVMGTRSGDIDPAIVEFLEKEEGLSAKEVVNILNKKSGVYGLTKGFSSDMRDIVDNAIEGDPVCRLALDVYSYRIAKYIGAYAAAMNGVDAIVFTAGVGENSPIMREEIIENYLGYLGIKIDKEANDFKGEEKIISTPDSKVIAMVVPTNEELMIAKDTKEIIEKGLDELKI

SEQ ID NO: 765 - DNA, 1251 bp, synthetic construct
  misc_feature 1..1251: note = variant of acetate kinase from Marinitoga sp. 38H-ov
  source 1..1251: mol_type = other DNA
atgcaccatcatcatcatcatggcggtagcggcatgaaagttctggtgattaattctggtagctcctccatcaaatatcagctcctcgatatgaccaacgaaaaggtattagcgaaaggcttggtcgagcgcattggcatcgacggttcgcgtatcgtgcataaagttaacggcgaaaaacacgtgctggaacatgagattaagaatcacgaaattggacttaaattggtcctggatcttcttacggacgaaaaatacggtgtgttgaaggatctcaaagaaatcgatgcagttgggcatcgcgtagtacatggcggcgagcgttttgccagtagcgtgaagattactgacgaagtcttaaagaccatcgagacgttgtcgttcttagctccgttacacaatccagcgaacattatgggtatcaagagcagcatgaaagtgttaccgggtgtgcctcaagttgccgtctttgatacagcgttccaccagaagatgccggagaaagcctatttgtacgcaatcccctatgagtactacgagaaatataaaattcgccgctatgggtttcatggaacctcacatcgttatgtgagtaaacgtgctgcggaaattatgggcaaaccgtacgatcagctcaagatcattaccgttcacgtgggtaacggcgcatcagttgcggcggtgaagaatggcgtatctgttgacacttccatgggtttcacaccacttgaaggtcttgtcatgggcacgcgcagcggcgatattgatccggccatcgtggaatttcttgagaaagaagaaggattgtcggccaaagaagtcgtcaacatcctcaacaagaaatctggtacttatgggctcaccaaaggctttagtagtgacatgcgtgacattgtggataatgctattgaaggtgatcctgtatgccgccttgcattagatgtgtacgaatatcgtatcgcgaaatatattggcgcatacgctgcggccatgaacggtgttgacgcgatcgtctttaccgcaggagttggcgaaaatagcccgattatgcgcgaagaaattattgagaactacttgggctacttagggatcaagatcgataaagaagccaatgacttcaaaggtgaggagaagatcatttcaacgcccgattccaaagtgattgcgatggtagttccgaccaacgaggagctcatgatcgccaaagacacgaaagaaatcattgagaaagggttggacgagcttaagatc

SEQ ID NO: 766 - protein, 417 aa, synthetic construct
  REGION 1..417: note = variant of acetate kinase from Marinitoga sp. 38H-ov
MHHHHHHGGSGMKVLVINSGSSSIKYQLLDMTNEKVLAKGLVERIGIDGSRIVHKVNGEKHVLEHEIKNHEIGLKLVLDLLTDEKYGVLKDLKEIDAVGHRVVHGGERFASSVKITDEVLKTIETLSFLAPLHNPANIMGIKSSMKVLPGVPQVAVFDTAFHQKMPEKAYLYAIPYEYYEKYKIRRYGFHGTSHRYVSKRAAEIMGKPYDQLKIITVHVGNGASVAAVKNGVSVDTSMGFTPLEGLVMGTRSGDIDPAIVEFLEKEEGLSAKEVVNILNKKSGTYGLTKGFSSDMRDIVDNAIEGDPVCRLALDVYEYRIAKYIGAYAAAMNGVDAIVFTAGVGENSPIMREEIIENYLGYLGIKIDKEANDFKGEEKIISTPDSKVIAMVVPTNEELMIAKDTKEIIEKGLDELKI

SEQ ID NO: 767 - DNA, 1251 bp, synthetic construct
  misc_feature 1..1251: note = variant of acetate kinase from Marinitoga sp. 38H-ov
  source 1..1251: mol_type = other DNA
atgcaccatcatcatcatcatggcggtagcggcatgaaagttctggtgattaattctggtagctcctccatcaaatatcagctcctcgatatgaccaacgaaaaggtattagcgaaaggcttggtcgagcgcattggcatcgacggttcgcgtatcgtgcataaagttaacggcgaaaaacacgtgctggaacatgagattaagaatcacgaaattggacttaaattggtcctggatcttcttacggacgaaaaatacggtgtgttgaaggatctcaaagaaatcgatgcagttgggcatcgcgtagtacatggcggcgagcgttttgccagtagcgtgaagattactgacgaagtcttaaagaccatcgagacgttgtcgttcttagctccgttacacaatccagcgaacattatgggtatcaagagcagcatgaaagtgttaccgggtgtgcctcaagttgccgtctttgatacagcgttccaccagaagatgccggagaaagcctatttgtacgcaatcccctatgagtactacgagaaatataaaattcgccgctatgggtttcatggaacctcacatcgttatgtgagtaaacgtgctgcggaaattatgggcaaaccgtacgatcagctcaagatcattaccgttcacgtgggtaacggcgcatcagttgcggcggtgaagaatggcgtatctgttgacacttccatgggtttcacaccacttgaaggtcttgtcatgggcacgcgcagcggcgatattgatccggccatcgtggaatttcttgagaaagaagaaggattgtcggccaaagaagtcgtcaacatcctcaacaagaaatctggtgtgtatgggctcaccaaaggctttagtagtgacatgcgtgacattgtggataatgctattgaaggtgatcctgtatgccgccttgcattagatgtgtacgaatatcgtatcgcgaaatatattggcgcatacgctgcggccatgaacggtgttgacgcgatcgtctttaccgcaggagttggcgaaaatagcccgattatgcgcgaagaaattattgagaactacttgggctacttagggatcaagatcgataaagaagccaatgacttcaaagtggaggagaagatcatttcaacgcccgattccaaagtgattgcgatggtagttccgaccaacgaggagctcatgatcgccaaagacacgaaagaaatcattgagaaagggttggacgagcttaagatc

SEQ ID NO: 768 - protein, 417 aa, synthetic construct
  REGION 1..417: note = variant of acetate kinase from Marinitoga sp. 38H-ov
MHHHHHHGGSGMKVLVINSGSSSIKYQLLDMTNEKVLAKGLVERIGIDGSRIVHKVNGEKHVLEHEIKNHEIGLKLVLDLLTDEKYGVLKDLKEIDAVGHRVVHGGERFASSVKITDEVLKTIETLSFLAPLHNPANIMGIKSSMKVLPGVPQVAVFDTAFHQKMPEKAYLYAIPYEYYEKYKIRRYGFHGTSHRYVSKRAAEIMGKPYDQLKIITVHVGNGASVAAVKNGVSVDTSMGFTPLEGLVMGTRSGDIDPAIVEFLEKEEGLSAKEVVNILNKKSGVYGLTKGFSSDMRDIVDNAIEGDPVCRLALDVYEYRIAKYIGAYAAAMNGVDAIVFTAGVGENSPIMREEIIENYLGYLGIKIDKEANDFKVEEKIISTPDSKVIAMVVPTNEELMIAKDTKEIIEKGLDELKI

SEQ ID NO: 769 - DNA, 1251 bp, synthetic construct
  misc_feature 1..1251: note = variant of acetate kinase from Marinitoga sp. 38H-ov
  source 1..1251: mol_type = other DNA
atgcaccatcatcatcatcatggcggtagcggcatgaaagttctggtgattaattctggtagctcctccatcaaatatcagctcctcgatatgaccaacgaaaaggtattagcgaaaggcttggtcgagcgcattggcatcgacggttcgcgtatcgtgcataaagttaacggcgaaaaacacgtgctggaacatgagattaagaatcacgaaattggacttaaattggtcctggatcttcttacggacgaaaaatacggtgtgttgaaggatctcaaagaaatcgatgcagttgggcatcgcgtagtacatggcggcgagcgttttgccagtagcgtgaagattactgacgaagtcttaaagaccatcgagacgttgtcgttcttagctccgttacacaatccagcgaacattatgggtatcaagagcagcatgaaagtgttaccgggtgtgcctcaagttgccgtctttgatacagcgttccaccagaagatgccggagaaagcctatttgtacgcaatcccctatgagtactacgagaaatataaaattcgccgctatgggtttcatggaacctcacatcgttatgtgagtaaacgtgctgcggaaattatgggcaaaccgtacgatcagctcaagatcattaccgttcacgtgggtaacggcgcatcagttgcggcggtgaagaatggcgtatctgttgacacttccatgggtttcacaccacttgaaggtcttgtcatgggcacgcgcagcggcgatattgatccggccatcgtggaatttcttgagaaagaagaaggattgtcggccaaagaagtcgtcaacatcctcaacaagaaatctggtgtgtatgggctcaccaaaggctttagtagtgacatgcgtgacattgtggataatgctattgaaggtgatcctgtatgccgccttgcattagatgtgtacgaatatcgtatcgcgaaatatattggcgcatacgctgcggccatgaacggtgttgacgcgatcgtctttaccgcaggagttggcgaaaatagcccgattatgcgcgaagaaattattgagaactacttgggctacttagggatcaagatcgataaagaagccaatgacttcgagggtgaggagaagatcatttcaacgcccgattccaaagtgattgcgatggtagttccgaccaacgaggagctcatgatcgccaaagacacgaaagaaatcattgagaaagggttggacgagcttaagatc

SEQ ID NO: 770 - protein, 417 aa, synthetic construct
  REGION 1..417: note = variant of acetate kinase from Marinitoga sp. 38H-ov
MHHHHHHGGSGMKVLVINSGSSSIKYQLLDMTNEKVLAKGLVERIGIDGSRIVHKVNGEKHVLEHEIKNHEIGLKLVLDLLTDEKYGVLKDLKEIDAVGHRVVHGGERFASSVKITDEVLKTIETLSFLAPLHNPANIMGIKSSMKVLPGVPQVAVFDTAFHQKMPEKAYLYAIPYEYYEKYKIRRYGFHGTSHRYVSKRAAEIMGKPYDQLKIITVHVGNGASVAAVKNGVSVDTSMGFTPLEGLVMGTRSGDIDPAIVEFLEKEEGLSAKEVVNILNKKSGVYGLTKGFSSDMRDIVDNAIEGDPVCRLALDVYEYRIAKYIGAYAAAMNGVDAIVFTAGVGENSPIMREEIIENYLGYLGIKIDKEANDFEGEEKIISTPDSKVIAMVVPTNEELMIAKDTKEIIEKGLDELKI

SEQ ID NO: 771 - DNA, 1251 bp, synthetic construct
  misc_feature 1..1251: note = variant of acetate kinase from Marinitoga sp. 38H-ov
  source 1..1251: mol_type = other DNA
atgcaccatcatcatcatcatggcggtagcggcatgaaagttctggtgattaattctggtagctcctccatcaaatatcagctcctcgatatgaccaacgaaaaggtattagcgaaaggcttggtcgagcgcattggcatcgacggttcgcgtatcgtgcataaagttaacggcgaaaaacacgtgctggaacatgagattaagaatcacgaaattggacttaaattggtcctggatcttcttacggacgaaaaatacggtgtgttgaaggatctcaaagaaatcgatgcagttgggcatcgcgtagtacatggcggcgagcgttttgccagtagcgtgaagattactgacgaagtcttaaagaccatcgagacgttgtcgttcttagctccgttacacaatccagcgaacattatgggtatcaagagcagcatgaaagtgttaccgggtgtgcctcaagttgccgtctttgatacagcgttccaccagaagatgccggagaaagcctatttgtacgcaatcccctatgagtactacgagaaatataaaattcgccgctatgggtttcatggaacctcacatcgttatgtgagtaaacgtgctgcggaaattatgggcaaaccgtacgatcagctcaagatcattaccgttcacgtgggtaacggcgcatcagttgcggcggtgaagaatggcgtatctgttgacacttccatgggtttcacaccacttgaaggtcttgtcatgggcacgcgcagcggcgatattgatccggccatcgtggaatttcttgagaaagaagaaggattgtcggccaaagaagtcgtcaacatcctcaacaagaaatctggtgtgtatgggctcaccaaaggctttagtagtgacatgcgtgacattgtggataatgctattgaaggtgatcctgtatgccgccttgcattagatgtgtacgaatatcgtatcgcgaaatatattggcgcatacgctgcggccatgaacggtgttgacgcgatcgtctttaccgcaggagttggcgaaaatagcccgattatgcgcgaagaaattattgagaactacttgggctacttagggatcaagatcgataaagaagccaatgacttcgcgggtgaggagaagatcatttcaacgcccgattccaaagtgattgcgatggtagttccgaccaacgaggagctcatgatcgccaaagacacgaaagaaatcattgagaaagggttggacgagcttaagatc

SEQ ID NO: 772 - protein, 417 aa, synthetic construct
  REGION 1..417: note = variant of acetate kinase from Marinitoga sp. 38H-ov
MHHHHHHGGSGMKVLVINSGSSSIKYQLLDMTNEKVLAKGLVERIGIDGSRIVHKVNGEKHVLEHEIKNHEIGLKLVLDLLTDEKYGVLKDLKEIDAVGHRVVHGGERFASSVKITDEVLKTIETLSFLAPLHNPANIMGIKSSMKVLPGVPQVAVFDTAFHQKMPEKAYLYAIPYEYYEKYKIRRYGFHGTSHRYVSKRAAEIMGKPYDQLKIITVHVGNGASVAAVKNGVSVDTSMGFTPLEGLVMGTRSGDIDPAIVEFLEKEEGLSAKEVVNILNKKSGVYGLTKGFSSDMRDIVDNAIEGDPVCRLALDVYEYRIAKYIGAYAAAMNGVDAIVFTAGVGENSPIMREEIIENYLGYLGIKIDKEANDFAGEEKIISTPDSKVIAMVVPTNEELMIAKDTKEIIEKGLDELKI

SEQ ID NO: 773 - DNA, 1251 bp, synthetic construct
  misc_feature 1..1251: note = variant of acetate kinase from Marinitoga sp. 38H-ov
  source 1..1251: mol_type = other DNA
atgcaccatcatcatcatcatggcggtagcggcatgaaagttctggtgattaattctggtagctcctccatcaaatatcagctcctcgatatgaccaacgaaaaggtattagcgaaaggcttggtcgagcgcattggcatcgacggttcgcgtatcgtgcataaagttaacggcgaaaaacacgtgctggaacatgagattaagaatcacgaaattggacttaaattggtcctggatcttcttacggacgaaaaatacggtgtgttgaaggatctcaaagaaatcgatgcagttgggcatcgcgtagtacatggcggcgagcgttttgccagtagcgtgaagattactgacgaagtcttaaagaccatcgagacgttgtcgttcttagctccgttacacaatccagcgaacattatgggtatcaagagcagcatgaaagtgttaccgggtgtgcctcaagttgccgtctttgatacagcgttccaccagaagatgccggagaaagcctatttgtacgcaatcccctatgagtactacgagaaatataaaattcgccgctatgggtttcatggaacctcacatcgttatgtgagtaaacgtgctgcggaaattatgggcaaaccgtacgatcagctcaagatcattaccgttcacgtgggtaacggcgcatcagttgcggcggtgaagaatggcgtatctgttgacacttccatgggtttcacaccacttgaaggtcttgtcatgggcacgcgcagcggcgatattgatccggccatcgtggaatttcttgagaaagaagaaggattgtcggccaaagaagtcgtcaacatcctcaacaagaaatctggtgtgtatgggctcaccaaaggctttagtagtgacatgcgtgacattgtggatagggctattgaaggtgatcctgtatgccgccttgcattagatgtgtacgaatatcgtatcgcgaaatatattggcgcatacgctgcggccatgaacggtgttgacgcgatcgtctttaccgcaggagttggcgaaaatagcccgattatgcgcgaagaaattattgagaactacttgggctacttagggatcaagatcgataaagaagccaatgacttcaaaggtgaggagaagatcatttcaacgcccgattccaaagtgattgcgatggtagttccgaccaacgaggagctcatgatcgccaaagacacgaaagaaatcattgagaaagggttggacgagcttaagatc

SEQ ID NO: 774 - protein, 417 aa, synthetic construct
  REGION 1..417: note = variant of acetate kinase from Marinitoga sp. 38H-ov
MHHHHHHGGSGMKVLVINSGSSSIKYQLLDMTNEKVLAKGLVERIGIDGSRIVHKVNGEKHVLEHEIKNHEIGLKLVLDLLTDEKYGVLKDLKEIDAVGHRVVHGGERFASSVKITDEVLKTIETLSFLAPLHNPANIMGIKSSMKVLPGVPQVAVFDTAFHQKMPEKAYLYAIPYEYYEKYKIRRYGFHGTSHRYVSKRAAEIMGKPYDQLKIITVHVGNGASVAAVKNGVSVDTSMGFTPLEGLVMGTRSGDIDPAIVEFLEKEEGLSAKEVVNILNKKSGVYGLTKGFSSDMRDIVDRAIEGDPVCRLALDVYEYRIAKYIGAYAAAMNGVDAIVFTAGVGENSPIMREEIIENYLGYLGIKIDKEANDFKGEEKIISTPDSKVIAMVVPTNEELMIAKDTKEIIEKGLDELKI

SEQ ID NO: 775 - DNA, 1251 bp, synthetic construct
  misc_feature 1..1251: note = variant of acetate kinase from Marinitoga sp. 38H-ov
  source 1..1251: mol_type = other DNA
atgcaccatcatcatcatcatggcggtagcggcatgaaagttctggtgattaattctggtagctcctccatcaaatatcagctcctcgatatgaccaacgaaaaggtattagcgaaaggcttggtcgagcgcattggcatcgacggttcgcgtatcgtgcataaagttaacggcgaaaaacacgtgctggaacatgagattaagaatcacgaaattggacttaaattggtcctggatcttcttacggacgaaaaatacggtgtgttgaaggatctcaaagaaatcgatgcagttgggcatcgcgtagtacatggcggcgagcgttttgccagtagcgtgaagattactgacgaagtcttaaagaccatcgagacgttgtcgttcttagctccgttacacaatccagcgaacattatgggtatcaagagcagcatgaaagtgttaccgggtgtgcctcaagttgccgtctttgatacagcgttccaccagaagatgccggagaaagcctatttgtacgcaatcccctatgagtactacgagaaatataaaattcgccgctatgggtttcatggaacctcacatcgttatgtgagtaaacgtgctgcggaaattatgggcaaaccgtacgatcagctcaagatcattaccgttcacgtgggtaacggcgcatcagttgcggcggtgaagaatggcgtatctgttgacacttccatgggtttcacaccacttgaaggtcttgtcatgggcacgcgcagcggcgatattgatccggccatcgtggaatttcttgagaaagaagaaggattgtcggccaaagaagtcgtcaacatcctcaacaagaaatctggtgtgtatgggctcaccaaaggctttagtagtgacatgcgtgacattgtggataatgctattgaaggtgatcctgtatgccgccttgcattagatgtgtacgaatatcgtatcgcgaaatatattggcgcatacgctgcggccatgaacggtgttgacgcgatcgtctttaccgcaggagttggcgaaaatagcccgattatgcgcgaagaatgtattgagaactacttgggctacttagggatcaagatcgataaagaagccaatgacttcaaaggtgaggagaagatcatttcaacgcccgattccaaagtgattgcgatggtagttccgaccaacgaggagctcatgatcgccaaagacacgaaagaaatcattgagaaagggttggacgagcttaagatc

SEQ ID NO: 776 - protein, 417 aa, synthetic construct
  REGION 1..417: note = variant of acetate kinase from Marinitoga sp. 38H-ov
MHHHHHHGGSGMKVLVINSGSSSIKYQLLDMTNEKVLAKGLVERIGIDGSRIVHKVNGEKHVLEHEIKNHEIGLKLVLDLLTDEKYGVLKDLKEIDAVGHRVVHGGERFASSVKITDEVLKTIETLSFLAPLHNPANIMGIKSSMKVLPGVPQVAVFDTAFHQKMPEKAYLYAIPYEYYEKYKIRRYGFHGTSHRYVSKRAAEIMGKPYDQLKIITVHVGNGASVAAVKNGVSVDTSMGFTPLEGLVMGTRSGDIDPAIVEFLEKEEGLSAKEVVNILNKKSGVYGLTKGFSSDMRDIVDNAIEGDPVCRLALDVYEYRIAKYIGAYAAAMNGVDAIVFTAGVGENSPIMREECIENYLGYLGIKIDKEANDFKGEEKIISTPDSKVIAMVVPTNEELMIAKDTKEIIEKGLDELKI

SEQ ID NO: 777 - DNA, 1251 bp, synthetic construct
  misc_feature 1..1251: note = variant of acetate kinase from Marinitoga sp. 38H-ov
  source 1..1251: mol_type = other DNA
atgcaccatcatcatcatcatggcggtagcggcatgaaagttctggtgattaattctggtagctcctccatcaaatatcagctcctcgatatgaccaacgaaaaggtattagcgaaaggcttggtcgagcgcattggcatcgacggttcgcgtatcgtgcataaagttaacggcgaaaaacacgtgctggaacatgagattaagaatcacgaaattggacttaaattggtcctggatcttcttacggacgaaaaatacggtgtgttgaaggatctcaaagaaatcgatgcagttgggcatcgcgtagtacatggcggcgagcgttttgccagtagcgtgaagattactgacgaagtcttaaagaccatcgagacgttgtcgttcttagctccgttacacaatccagcgaacattatgggtatcaagagcagcatgaaagtgttaccgggtgtgcctcaagttgccgtctttgatacagcgttccaccagaagatgccggagaaagcctatttgtacgcaatcccctatgagtactacgagaaatataaaattcgccgctatgggtttcatggaacctcacatcgttatgtgagtaaacgtgctgcggaaattatgggcaaaccgtacgatcagctcaagatcattaccgttcacgtgggtaacggcgcatcagttgcggcggtgaagaatggcgtatctgttgacacttccatgggtttcacaccacttgaaggtcttgtcatgggcacgcgcagcggcgatattgatccggccatcgtggaatttcttgagaaagaagaaggattgtcggccaaagaagtcgtcaacatcctcaacaagaaatctggtgtgtatgggctcaccaaaggctttagtagtgacatgcgtgacattgtggataatgctattgaaggtgatcctgtatgccgccttgcattagatgtgtacgtttatcgtatcgcgaaatatattggcgcatacgctgcggccatgaacggtgttgacgcgatcgtctttaccgcaggagttggcgaaaatagcccgattatgcgcgaagaaattattgagaactacttgggctacttagggatcaagatcgataaagaagccaatgacttcaaaggtgaggagaagatcatttcaacgcccgattccaaagtgattgcgatggtagttccgaccaacgaggagctcatgatcgccaaagacacgaaagaaatcattgagaaagggttggacgagcttaagatc

SEQ ID NO: 778 - protein, 417 aa, synthetic construct
  REGION 1..417: note = variant of acetate kinase from Marinitoga sp. 38H-ov
MHHHHHHGGSGMKVLVINSGSSSIKYQLLDMTNEKVLAKGLVERIGIDGSRIVHKVNGEKHVLEHEIKNHEIGLKLVLDLLTDEKYGVLKDLKEIDAVGHRVVHGGERFASSVKITDEVLKTIETLSFLAPLHNPANIMGIKSSMKVLPGVPQVAVFDTAFHQKMPEKAYLYAIPYEYYEKYKIRRYGFHGTSHRYVSKRAAEIMGKPYDQLKIITVHVGNGASVAAVKNGVSVDTSMGFTPLEGLVMGTRSGDIDPAIVEFLEKEEGLSAKEVVNILNKKSGVYGLTKGFSSDMRDIVDNAIEGDPVCRLALDVYVYRIAKYIGAYAAAMNGVDAIVFTAGVGENSPIMREEIIENYLGYLGIKIDKEANDFKGEEKIISTPDSKVIAMVVPTNEELMIAKDTKEIIEKGLDELKI

SEQ ID NO: 779 - DNA, 1251 bp, synthetic construct
  misc_feature 1..1251: note = variant of acetate kinase from Marinitoga sp. 38H-ov
  source 1..1251: mol_type = other DNA
atgcaccatcatcatcatcatggcggtagcggcatgaaagttctggtgattaattctggtagctcctccatcaaatatcagctcctcgatatgaccaacgaaaaggtattagcgaaaggcttggtcgagcgcattggcatcgacggttcgcgtatcgtgcataaagttaacggcgaaaaacacgtgctggaacatgagattaagaatcacgaaattggacttaaattggtcctggatcttcttacggacgaaaaatacggtgtgttgaaggatctcaaagaaatcgatgcagttgggcatcgcgtagtacatggcggcgagcgttttgccagtagcgtgaagattactgacgaagtcttaaagaccatcgagacgttgtcgttcttagctccgttacacaatccagcgaacattatgggtatcaagagcagcatgaaagtgttaccgggtgtgcctcaagttgccgtctttgatacagcgttccaccagaagatgccggagaaagcctatttgtacgcaatcccctatgagtactacgagaaatataaaattcgccgctatgggtttcatggaacctcacatcgttatgtgagtaaacgtgctgcggaaattatgggcaaaccgtacgatcagctcaagatcattaccgttcacgtgggtaacggcgcatcagttgcggcggtgaagaatggcgtatctgttgacacttccatgggtttcacaccacttgaaggtcttgtcatgggcacgcgcagcggcgatattgatccggccatcgtggaatttcttgagaaagaagaaggattgtcggccaaagaagtcgtcaacatcctcaacaagaaatctggtgtgtatgggctcaccaaaggctttagtagtgacatgcgtgacattgtggataatgctattgaaggtgatcctgtatgccgccttgcattagatgtgtacgaatatcgtatcgcgaaatatattggcgcatacgctgcggccatgaacggtgttgacgcgatcgtctttaccgcaggagttggcgaaaatagcccgattatgcgcagggaaattattgagaactacttgggctacttagggatcaagatcgataaagaagccaatgacttcaaaggtgaggagaagatcatttcaacgcccgattccaaagtgattgcgatggtagttccgaccaacgaggagctcatgatcgccaaagacacgaaagaaatcattgagaaagggttggacgagcttaagatc

SEQ ID NO: 780 - protein, 417 aa, synthetic construct
  REGION 1..417: note = variant of acetate kinase from Marinitoga sp. 38H-ov
MHHHHHHGGSGMKVLVINSGSSSIKYQLLDMTNEKVLAKGLVERIGIDGSRIVHKVNGEKHVLEHEIKNHEIGLKLVLDLLTDEKYGVLKDLKEIDAVGHRVVHGGERFASSVKITDEVLKTIETLSFLAPLHNPANIMGIKSSMKVLPGVPQVAVFDTAFHQKMPEKAYLYAIPYEYYEKYKIRRYGFHGTSHRYVSKRAAEIMGKPYDQLKIITVHVGNGASVAAVKNGVSVDTSMGFTPLEGLVMGTRSGDIDPAIVEFLEKEEGLSAKEVVNILNKKSGVYGLTKGFSSDMRDIVDNAIEGDPVCRLALDVYEYRIAKYIGAYAAAMNGVDAIVFTAGVGENSPIMRREIIENYLGYLGIKIDKEANDFKGEEKIISTPDSKVIAMVVPTNEELMIAKDTKEIIEKGLDELKI

SEQ ID NO: 781 - DNA, 1251 bp, synthetic construct
  misc_feature 1..1251: note = variant of acetate kinase from Marinitoga sp. 38H-ov
  source 1..1251: mol_type = other DNA
atgcaccatcatcatcatcatggcggtagcggcatgaaagttctggtgattaattctggtagctcctccatcaaatatcagctcctcgatatgaccaacgaaaaggtattagcgaaaggcttggtcgagcgcattggcatcgacggttcgcgtatcgtgcataaagttaacggcgaaaaacacgtgctggaacatgagattaagaatcacgaaattggacttaaattggtcctggatcttcttacggacgaaaaatacggtgtgttgaaggatctcaaagaaatcgatgcagttgggcatcgcgtagtacatggcggcgagcgttttgccagtagcgtgaagattactgacgaagtcttaaagaccatcgagacgttgtcgttcttagctccgttacacaatccagcgaacattatgggtatcaagagcagcatgaaagtgttaccgggtgtgcctcaagttgccgtctttgatacagcgttccaccagaagatgccggagaaagcctatttgtacgcaatcccctatgagtactacgagaaatataaaattcgccgctatgggtttcatggaacctcacatcgttatgtgagtaaacgtgctgcggaaattatgggcaaaccgtacgatcagctcaagatcattaccgttcacgtgggtaacggcgcatcagttgcggcggtgaagaatggcgtatctgttgacacttccatgggtttcacaccacttgaaggtcttgtcatgggcacgcgcagcggcgatattgatccggccatcgtggaatttcttgagaaagaagaaggattgtcggccaaagaagtcgtcaacatcctcaacaagaaatctggtgtgtatgggctcaccaaaggctttagtagtgacatgcgtgacattgtggataatgctattgaaggtgatcctgtatgccgccttgcattagatgtgtacgaatatcgtatcgcgaaatatattggcgcatacgctgcggccatgaacggtgttgacgcgatcgtctttaccgcaggagttggcgaaaatagcccgattatgcgcgaagaaattattgagaactacttgggctacttagggatcaagatcgataaagaagccaatgacttctggggtgaggagaagatcatttcaacgcccgattccaaagtgattgcgatggtagttccgaccaacgaggagctcatgatcgccaaagacacgaaagaaatcattgagaaagggttggacgagcttaagatc

SEQ ID NO: 782 - protein, 417 aa, synthetic construct
  REGION 1..417: note = variant of acetate kinase from Marinitoga sp. 38H-ov
MHHHHHHGGSGMKVLVINSGSSSIKYQLLDMTNEKVLAKGLVERIGIDGSRIVHKVNGEKHVLEHEIKNHEIGLKLVLDLLTDEKYGVLKDLKEIDAVGHRVVHGGERFASSVKITDEVLKTIETLSFLAPLHNPANIMGIKSSMKVLPGVPQVAVFDTAFHQKMPEKAYLYAIPYEYYEKYKIRRYGFHGTSHRYVSKRAAEIMGKPYDQLKIITVHVGNGASVAAVKNGVSVDTSMGFTPLEGLVMGTRSGDIDPAIVEFLEKEEGLSAKEVVNILNKKSGVYGLTKGFSSDMRDIVDNAIEGDPVCRLALDVYEYRIAKYIGAYAAAMNGVDAIVFTAGVGENSPIMREEIIENYLGYLGIKIDKEANDFWGEEKIISTPDSKVIAMVVPTNEELMIAKDTKEIIEKGLDELKI

SEQ ID NO: 783 - DNA, 1251 bp, synthetic construct
  misc_feature 1..1251: note = variant of acetate kinase from Marinitoga sp. 38H-ov
  source 1..1251: mol_type = other DNA
atgcaccatcatcatcatcatggcggtagcggcatgaaagttctggtgattaattctggtagctcctccatcaaatatcagctcctcgatatgaccaacgaaaaggtattagcgaaaggcttggtcgagcgcattggcatcgacggttcgcgtatcgtgcataaagttaacggcgaaaaacacgtgctggaacatgagattaagaatcacgaaattggacttaaattggtcctggatcttcttacggacgaaaaatacggtgtgttgaaggatctcaaagaaatcgatgcagttgggcatcgcgtagtacatggcggcgagcgttttgccagtagcgtgaagattactgacgaagtcttaaagaccatcgagacgttgtcgttcttagctccgttacacaatccagcgaacattatgggtatcaagagcagcatgaaagtgttaccgggtgtgcctcaagttgccgtctttgatacagcgttccaccagaagatgccggagaaagcctatttgtacgcaatcccctatgagtactacgagaaatataaaattcgccgctatgggtttcatggaacctcacatcgttatgtgagtaaacgtgctgcggaaattatgggcaaaccgtacgatcagctcaagatcattaccgttcacgtgggtaacggcgcatcagttgcggcggtgaagaatggcgtatctgttgacacttccatgggtttcacaccacttgaaggtcttgtcatgggcacgcgcagcggcgatattgatccggccatcgtggaatttcttgagaaagaagaaggattgtcggccaaagaagtcgtcaacatcctcaacaagaaatctggtgtgtatgggctcaccaaaggctttagtagtgacatgcgtgacattgtggataatgctattgaaggtgatcctgtatgccgccttgcatttgatgtgtacgaatatcgtatcgcgaaatatattggcgcatacgctgcggccatgaacggtgttgacgcgatcgtctttaccgcaggagttggcgaaaatagcccgattatgcgcgaagaaattattgagaactacttgggctacttagggatcaagatcgataaagaagccaatgacttcaaaggtgaggagaagatcatttcaacgcccgattccaaagtgattgcgatggtagttccgaccaacgaggagctcatgatcgccaaagacacgaaagaaatcattgagaaagggttggacgagcttaagatc

SEQ ID NO: 784 - protein, 417 aa, synthetic construct
  REGION 1..417: note = variant of acetate kinase from Marinitoga sp. 38H-ov
MHHHHHHGGSGMKVLVINSGSSSIKYQLLDMTNEKVLAKGLVERIGIDGSRIVHKVNGEKHVLEHEIKNHEIGLKLVLDLLTDEKYGVLKDLKEIDAVGHRVVHGGERFASSVKITDEVLKTIETLSFLAPLHNPANIMGIKSSMKVLPGVPQVAVFDTAFHQKMPEKAYLYAIPYEYYEKYKIRRYGFHGTSHRYVSKRAAEIMGKPYDQLKIITVHVGNGASVAAVKNGVSVDTSMGFTPLEGLVMGTRSGDIDPAIVEFLEKEEGLSAKEVVNILNKKSGVYGLTKGFSSDMRDIVDNAIEGDPVCRLAFDVYEYRIAKYIGAYAAAMNGVDAIVFTAGVGENSPIMREEIIENYLGYLGIKIDKEANDFKGEEKIISTPDSKVIAMVVPTNEELMIAKDTKEIIEKGLDELKI

SEQ ID NO: 785 - DNA, 1251 bp, synthetic construct
  misc_feature 1..1251: note = variant of acetate kinase from Marinitoga sp. 38H-ov
  source 1..1251: mol_type = other DNA
atgcaccatcatcatcatcatggcggtagcggcatgaaagttctggtgattaattctggtagctcctccatcaaatatcagctcctcgatatgaccaacgaaaaggtattagcgaaaggcttggtcgagcgcattggcatcgacggttcgcgtatcgtgcataaagttaacggcgaaaaacacgtgctggaacatgagattaagaatcacgaaattggacttaaattggtcctggatcttcttacggacgaaaaatacggtgtgttgaaggatctcaaagaaatcgatgcagttgggcatcgcgtagtacatggcggcgagcgttttgccagtagcgtgaagattactgacgaagtcttaaagaccatcgagacgttgtcgttcttagctccgttacacaatccagcgaacattatgggtatcaagagcagcatgaaagtgttaccgggtgtgcctcaagttgccgtctttgatacagcgttccaccagaagatgccggagaaagcctatttgtacgcaatcccctatgagtactacgagaaatataaaattcgccgctatgggtttcatggaacctcacatcgttatgtgagtaaacgtgctgcggaaattatgggcaaaccgtacgatcagctcaagatcattaccgttcacgtgggtaacggcgcatcagttgcggcggtgaagaatggcgtatctgttgacacttccatgggtttcacaccacttgaaggtcttgtcatgggcacgcgcagcggcgatattgatccggccatcgtggaatttcttgagaaagaagaaggattgtcggccaaagaagtcgtcaacatcctcaacaagaaatctggtgtgtatgggctcaccaaaggctttagtagtgacatgcgtgacattgtggataatgctattgaaggtgatcctgtatgccgccttgcattagatgtgtacgaatatcgtatcgcgaaatatattggcgcatacgctgcggccatgaacggtgttgacgcgatcgtctttaccgcaggagttggcgaaaatagcccgattatgcgcgaagaatctattgagaactacttgggctacttagggatcaagatcgataaagaagccaatgacttcaaaggtgaggagaagatcatttcaacgcccgattccaaagtgattgcgatggtagttccgaccaacgaggagctcatgatcgccaaagacacgaaagaaatcattgagaaagggttggacgagcttaagatc

SEQ ID NO: 786 - protein, 417 aa, synthetic construct
  REGION 1..417: note = variant of acetate kinase from Marinitoga sp. 38H-ov
MHHHHHHGGSGMKVLVINSGSSSIKYQLLDMTNEKVLAKGLVERIGIDGSRIVHKVNGEKHVLEHEIKNHEIGLKLVLDLLTDEKYGVLKDLKEIDAVGHRVVHGGERFASSVKITDEVLKTIETLSFLAPLHNPANIMGIKSSMKVLPGVPQVAVFDTAFHQKMPEKAYLYAIPYEYYEKYKIRRYGFHGTSHRYVSKRAAEIMGKPYDQLKIITVHVGNGASVAAVKNGVSVDTSMGFTPLEGLVMGTRSGDIDPAIVEFLEKEEGLSAKEVVNILNKKSGVYGLTKGFSSDMRDIVDNAIEGDPVCRLALDVYEYRIAKYIGAYAAAMNGVDAIVFTAGVGENSPIMREESIENYLGYLGIKIDKEANDFKGEEKIISTPDSKVIAMVVPTNEELMIAKDTKEIIEKGLDELKI

SEQ ID NO: 787 - DNA, 1251 bp, synthetic construct
  misc_feature 1..1251: note = variant of acetate kinase from Marinitoga sp. 38H-ov
  source 1..1251: mol_type = other DNA
atgcaccatcatcatcatcatggcggtagcggcatgaaagttctggtgattaattctggtagctcctccatcaaatatcagctcctcgatatgaccaacgaaaaggtattagcgaaaggcttggtcgagcgcattggcatcgacggttcgcgtatcgtgcataaagttaacggcgaaaaacacgtgctggaacatgagattaagaatcacgaaattggacttaaattggtcctggatcttcttacggacgaaaaatacggtgtgttgaaggatctcaaagaaatcgatgcagttgggcatcgcgtagtacatggcggcgagcgttttgccagtagcgtgaagattactgacgaagtcttaaagaccatcgagacgttgtcgttcttagctccgttacacaatccagcgaacattatgggtatcaagagcagcatgaaagtgttaccgggtgtgcctcaagttgccgtctttgatacagcgttccaccagaagatgccggagaaagcctatttgtacgcaatcccctatgagtactacgagaaatataaaattcgccgctatgggtttcatggaacctcacatcgttatgtgagtaaacgtgctgcggaaattatgggcaaaccgtacgatcagctcaagatcattaccgttcacgtgggtaacggcgcatcagttgcggcggtgaagaatggcgtatctgttgacacttccatgggtttcacaccacttgaaggtcttgtcatgggcacgcgcagcggcgatattgatccggccatcgtggaatttcttgagaaagaagaaggattgtcggccaaagaagtcgtcaacatcctcaacaagaaatctggtgtgtatgggctcaccaaaggctttagtagtgacatgcgtgacattgtggataatgctattgaaggtgatcctgtatgccgccttgcattagatgtgtacgaatatcgtatcgcgaaatatattggcgcatacgctgcggccatgaacggtgttgacgcgatcgtctttaccgcaggagttggcgaaaatagcccgattatgcgcgaagaaattattgagaactacttgggctacttagggatcaagatcgataaagaagccaattatttcaaaggtgaggagaagatcatttcaacgcccgattccaaagtgattgcgatggtagttccgaccaacgaggagctcatgatcgccaaagacacgaaagaaatcattgagaaagggttggacgagcttaagatc

SEQ ID NO: 788 - protein, 417 aa, synthetic construct
  REGION 1..417: note = variant of acetate kinase from Marinitoga sp. 38H-ov
MHHHHHHGGSGMKVLVINSGSSSIKYQLLDMTNEKVLAKGLVERIGIDGSRIVHKVNGEKHVLEHEIKNHEIGLKLVLDLLTDEKYGVLKDLKEIDAVGHRVVHGGERFASSVKITDEVLKTIETLSFLAPLHNPANIMGIKSSMKVLPGVPQVAVFDTAFHQKMPEKAYLYAIPYEYYEKYKIRRYGFHGTSHRYVSKRAAEIMGKPYDQLKIITVHVGNGASVAAVKNGVSVDTSMGFTPLEGLVMGTRSGDIDPAIVEFLEKEEGLSAKEVVNILNKKSGVYGLTKGFSSDMRDIVDNAIEGDPVCRLALDVYEYRIAKYIGAYAAAMNGVDAIVFTAGVGENSPIMREEIIENYLGYLGIKIDKEANYFKGEEKIISTPDSKVIAMVVPTNEELMIAKDTKEIIEKGLDELKI

SEQ ID NO: 789 - DNA, 1251 bp, synthetic construct
  misc_feature 1..1251: note = variant of acetate kinase from Marinitoga sp. 38H-ov
  source 1..1251: mol_type = other DNA
atgcaccatcatcatcatcatggcggtagcggcatgaaagttctggtgattaattctggtagctcctccatcaaatatcagctcctcgatatgaccaacgaaaaggtattagcgaaaggcttggtcgagcgcattggcatcgacggttcgcgtatcgtgcataaagttaacggcgaaaaacacgtgctggaacatgagattaagaatcacgaaattggacttaaattggtcctggatcttcttacggacgaaaaatacggtgtgttgaaggatctcaaagaaatcgatgcagttgggcatcgcgtagtacatggcggcgagcgttttgccagtagcgtgaagattactgacgaagtcttaaagaccatcgagacgttgtcgttcttagctccgttacacaatccagcgaacattatgggtatcaagagcagcatgaaagtgttaccgggtgtgcctcaagttgccgtctttgatacagcgttccaccagaagatgccggagaaagcctatttgtacgcaatcccctatgagtactacgagaaatataaaattcgccgctatgggtttcatggaacctcacatcgttatgtgagtaaacgtgctgcggaaattatgggcaaaccgtacgatcagctcaagatcatttctgttcacgtgggtaacggcgcatcagttgcggcggtgaagaatggcgtatctgttgacacttccatgggtttcacaccacttgaaggtcttgtcatgggcacgcgcagcggcgatattgatccggccatcgtggaatttcttgagaaagaagaaggattgtcggccaaagaagtcgtcaacatcctcaacaagaaatctggtgtgtatgggctcaccaaaggctttagtagtgacatgcgtgacattgtggataatgctattgaaggtgatcctgtatgccgccttgcattagatgtgtacgaatatcgtatcgcgaaatatattggcgcatacgctgcggccatgaacggtgttgacgcgatcgtctttaccgcaggagttggcgaaaatagcccgattatgcgcgaagaaattattgagaactacttgggctacttagggatcaagatcgataaagaagccaatgacttcaaaggtgaggagaagatcatttcaacgcccgattccaaagtgattgcgatggtagttccgaccaacgaggagctcatgatcgccaaagacacgaaagaaatcattgagaaagggttggacgagcttaagatc

SEQ ID NO: 790 - protein, 417 aa, synthetic construct
  REGION 1..417: note = variant of acetate kinase from Marinitoga sp. 38H-ov
MHHHHHHGGSGMKVLVINSGSSSIKYQLLDMTNEKVLAKGLVERIGIDGSRIVHKVNGEKHVLEHEIKNHEIGLKLVLDLLTDEKYGVLKDLKEIDAVGHRVVHGGERFASSVKITDEVLKTIETLSFLAPLHNPANIMGIKSSMKVLPGVPQVAVFDTAFHQKMPEKAYLYAIPYEYYEKYKIRRYGFHGTSHRYVSKRAAEIMGKPYDQLKIISVHVGNGASVAAVKNGVSVDTSMGFTPLEGLVMGTRSGDIDPAIVEFLEKEEGLSAKEVVNILNKKSGVYGLTKGFSSDMRDIVDNAIEGDPVCRLALDVYEYRIAKYIGAYAAAMNGVDAIVFTAGVGENSPIMREEIIENYLGYLGIKIDKEANDFKGEEKIISTPDSKVIAMVVPTNEELMIAKDTKEIIEKGLDELKI

SEQ ID NO: 791 - DNA, 1251 bp, synthetic construct
  misc_feature 1..1251: note = variant of acetate kinase from Marinitoga sp. 38H-ov
  source 1..1251: mol_type = other DNA
atgcaccatcatcatcatcatggcggtagcggcatgaaagttctggtgattaattctggtagctcctccatcaaatatcagctcctcgatatgaccaacgaaaaggtattagcgaaaggcttggtcgagcgcattggcatcgacggttcgcgtatcgtgcataaagttaacggcgaaaaacacgtgctggaacatgagattaagaatcacgaaattggacttaaattggtcctggatcttcttacggacgaaaaatacggtgtgttgaaggatctcaaagaaatcgatgcagttgggcatcgcgtagtacatggcggcgagcgttttgccagtagcgtgaagattactgacgaagtcttaaagaccatcgagacgttgtcgttcttagctccgttacacaatccagcgaacattatgggtatcaagagcagcatgaaagtgttaccgggtgtgcctcaagttgccgtctttgatacagcgttccaccagaagatgccggagaaagcctatttgtacgcaatcccctatgagtactacgagaaatataaaattcgccgctatgggtttcatggaacctcacatcgttatgtgagtaaacgtgctgcggaaattatgggcaaaccgtacgatcagctcaagatcattaccgttcacgtgggtaacggcgcatcagttgcggcggtgaagaatggcgtatctgttgacacttccatgggtttcacaccacttgaaggtcttgtcatgggcacgcgcagcggcgatattgatccggccatcgtggaatttcttgagaaagaagaaggattgtcggccaaagaagtcgtcaacatcctcaacaagaaatctggtgtgtatgggctcaccaaaggctttagtagtgacatgcgtgacattgtggataatgctattgaaggtgatcctgtatgccgccttgcattagatgtgtacgaatatcgtatcgcgaaatatattggcgcatacgctgcggccatgaacggtgttgacgcgatcgtctttaccgcaggagttggcgaaaatagcccgattctgcgcgaagaaattattgagaactacttgggctacttagggatcaagatcgataaagaagccaatgacttcaaaggtgaggagaagatcatttcaacgcccgattccaaagtgattgcgatggtagttccgaccaacgaggagctcatgatcgccaaagacacgaaagaaatcattgagaaagggttggacgagcttaagatc

SEQ ID NO: 792 - protein, 417 aa, synthetic construct
  REGION 1..417: note = variant of acetate kinase from Marinitoga sp. 38H-ov
MHHHHHHGGSGMKVLVINSGSSSIKYQLLDMTNEKVLAKGLVERIGIDGSRIVHKVNGEKHVLEHEIKNHEIGLKLVLDLLTDEKYGVLKDLKEIDAVGHRVVHGGERFASSVKITDEVLKTIETLSFLAPLHNPANIMGIKSSMKVLPGVPQVAVFDTAFHQKMPEKAYLYAIPYEYYEKYKIRRYGFHGTSHRYVSKRAAEIMGKPYDQLKIITVHVGNGASVAAVKNGVSVDTSMGFTPLEGLVMGTRSGDIDPAIVEFLEKEEGLSAKEVVNILNKKSGVYGLTKGFSSDMRDIVDNAIEGDPVCRLALDVYEYRIAKYIGAYAAAMNGVDAIVFTAGVGENSPILREEIIENYLGYLGIKIDKEANDFKGEEKIISTPDSKVIAMVVPTNEELMIAKDTKEIIEKGLDELKI

SEQ ID NO: 793 - DNA, 1251 bp, synthetic construct
  misc_feature 1..1251: note = variant of acetate kinase from Marinitoga sp. 38H-ov
  source 1..1251: mol_type = other DNA
atgcaccatcatcatcatcatggcggtagcggcatgaaagttctggtgattaattctggtagctcctccatcaaatatcagctcctcgatatgaccaacgaaaaggtattagcgaaaggcttggtcgagcgcattggcatcgacggttcgcgtatcgtgcataaagttaacggcgaaaaacacgtgctggaacatgagattaagaatcacgaaattggacttaaattggtcctggatcttcttacggacgaaaaatacggtgtgttgaaggatctcaaagaaatcgatgcagttgggcatcgcgtagtacatggcggcgagcgttttgccagtagcgtgaagattactgacgaagtcttaaagaccatcgagacgttgtcgttcttagctccgttacacaatccagcgaacattatgggtatcaagagcagcatgaaagtgttaccgggtgtgcctcaagttgccgtctttgatacagcgttccaccagaagatgccggagaaagcctatttgtacgcaatcccctatgagtactacgagaaatataaaattcgccgctatgggtttcatggaacctcacatcgttatgtgagtaaacgtgctgcggaaattatgggcaaaccgtacgatcagctcaagatcattaccgttcacgtgggtaacggcgcatcagttgcggcggtgaagaatggcgtatctgttgacacttccatgggtttcacaccacttgaaggtcttgtcatgggcacgcgcagcggcgatattgatccggccatcgtggaatttcttgagaaagaagaaggattgtcggccaaagaagtcgtcaacatcctcaacaagaaatctggtgtgtatgggctcaccaaaggctttagtagtgacatgcgtgacttggtggataatgctattgaaggtgatcctgtatgccgccttgcattagatgtgtacgaatatcgtatcgcgaaatatattggcgcatacgctgcggccatgaacggtgttgacgcgatcgtctttaccgcaggagttggcgaaaatagcccgattatgcgcgaagaaattattgagaactacttgggctacttagggatcaagatcgataaagaagccaatgacttcaaaggtgaggagaagatcatttcaacgcccgattccaaagtgattgcgatggtagttccgaccaacgaggagctcatgatcgccaaagacacgaaagaaatcattgagaaagggttggacgagcttaagatc

SEQ ID NO: 794 - protein, 417 aa, synthetic construct
  REGION 1..417: note = variant of acetate kinase from Marinitoga sp. 38H-ov
MHHHHHHGGSGMKVLVINSGSSSIKYQLLDMTNEKVLAKGLVERIGIDGSRIVHKVNGEKHVLEHEIKNHEIGLKLVLDLLTDEKYGVLKDLKEIDAVGHRVVHGGERFASSVKITDEVLKTIETLSFLAPLHNPANIMGIKSSMKVLPGVPQVAVFDTAFHQKMPEKAYLYAIPYEYYEKYKIRRYGFHGTSHRYVSKRAAEIMGKPYDQLKIITVHVGNGASVAAVKNGVSVDTSMGFTPLEGLVMGTRSGDIDPAIVEFLEKEEGLSAKEVVNILNKKSGVYGLTKGFSSDMRDLVDNAIEGDPVCRLALDVYEYRIAKYIGAYAAAMNGVDAIVFTAGVGENSPIMREEIIENYLGYLGIKIDKEANDFKGEEKIISTPDSKVIAMVVPTNEELMIAKDTKEIIEKGLDELKI

SEQ ID NO: 795 - DNA, 1251 bp, synthetic construct
  misc_feature 1..1251: note = variant of acetate kinase from Marinitoga sp. 38H-ov
  source 1..1251: mol_type = other DNA
atgcaccatcatcatcatcatggcggtagcggcatgaaagttctggtgattaattctggtagctcctccatcaaatatcagctcctcgatatgaccaacgaaaaggtattagcgaaaggcttggtcgagcgcattggcatcgacggttcgcgtatcgtgcataaagttaacggcgaaaaacacgtgctggaacatgagattaagaatcacgaaattggacttaaattggtcctggatcttcttacggacgaaaaatacggtgtgttgaaggatctcaaagaaatcgatgcagttgggcatcgcgtagtacatggcggcgagcgttttgccagtagcgtgaagattactgacgaagtcttaaagaccatcgagacgttgtcgttcttagctccgttacacaatccagcgaacattatgggtatcaagagcagcatgaaagtgttaccgggtgtgcctcaagttgccgtctttgatacagcgttccaccagaagatgccggagaaagcctatttgtacgcaatcccctatgagtactacgagaaatataaaattcgccgctatgggtttcatggaacctcacatcgttatgtgagtaaacgtgctgcggaaattatgggcaaaccgtacgatcagctcaagatcattaccgttcacgtgggtaacggcgcatcagttgcggcggtgaagaatggcgtatctgttgacacttccatgggtttcacaccacttgaaggtcttgtcatgggcacgcgcagcggcgatattgatccggccatcgtggaatttcttgagaaagaagaaggattgtcggccaaagaagtcgtcaacatcctcaacaagaaatctggtgtgtatgggctcaccaaaggctttagtagtgacatgcgtccgattgtggataatgctattgaaggtgatcctgtatgccgccttgcattagatgtgtacgaatatcgtatcgcgaaatatattggcgcatacgctgcggccatgaacggtgttgacgcgatcgtctttaccgcaggagttggcgaaaatagcccgattatgcgcgaagaaattattgagaactacttgggctacttagggatcaagatcgataaagaagccaatgacttcaaaggtgaggagaagatcatttcaacgcccgattccaaagtgattgcgatggtagttccgaccaacgaggagctcatgatcgccaaagacacgaaagaaatcattgagaaagggttggacgagcttaagatc

SEQ ID NO: 796 - protein, 417 aa, synthetic construct
  REGION 1..417: note = variant of acetate kinase from Marinitoga sp. 38H-ov
MHHHHHHGGSGMKVLVINSGSSSIKYQLLDMTNEKVLAKGLVERIGIDGSRIVHKVNGEKHVLEHEIKNHEIGLKLVLDLLTDEKYGVLKDLKEIDAVGHRVVHGGERFASSVKITDEVLKTIETLSFLAPLHNPANIMGIKSSMKVLPGVPQVAVFDTAFHQKMPEKAYLYAIPYEYYEKYKIRRYGFHGTSHRYVSKRAAEIMGKPYDQLKIITVHVGNGASVAAVKNGVSVDTSMGFTPLEGLVMGTRSGDIDPAIVEFLEKEEGLSAKEVVNILNKKSGVYGLTKGFSSDMRPIVDNAIEGDPVCRLALDVYEYRIAKYIGAYAAAMNGVDAIVFTAGVGENSPIMREEIIENYLGYLGIKIDKEANDFKGEEKIISTPDSKVIAMVVPTNEELMIAKDTKEIIEKGLDELKI

SEQ ID NO: 797 - DNA, 1251 bp, synthetic construct
  misc_feature 1..1251: note = variant of acetate kinase from Marinitoga sp. 38H-ov
  source 1..1251: mol_type = other DNA
atgcaccatcatcatcatcatggcggtagcggcatgaaagttctggtgattaattctggtagctcctccatcaaatatcagctcctcgatatgaccaacgaaaaggtattagcgaaaggcttggtcgagcgcattggcatcgacggttcgcgtatcgtgcataaagttaacggcgaaaaacacgtgctggaacatgagattaagaatcacgaaattggacttaaattggtcctggatcttcttacggacgaaaaatacggtgtgttgaaggatctcaaagaaatcgatgcagttgggcatcgcgtagtacatggcggcgagcgttttgccagtagcgtgaagattactgacgaagtcttaaagaccatcgagacgttgtcgttcttagctccgttacacaatccagcgaacattatgggtatcaagagcagcatgaaagtgttaccgggtgtgcctcaagttgccgtctttgatacagcgttccaccagaagatgccggagaaagcctatttgtacgcaatcccctatgagtactacgagaaatataaaattcgccgctatgggtttcatggaacctcacatcgttatgtgagtaaacgtgctgcggaaattatgggcaaaccgtacgatcagctcaagatcattaccgttcacgtgggtaacggcgcatcagttgcggcggtgaagaatggcgtatctgttgacacttccatgggtttcacaccacttgaaggtcttgtcatgggcacgcgcagcggcgatattgatccggccatcgtggaatttcttgagaaagaagaaggattgtcggccaaagaagtcgtcaacatcctcaacaagaaatctggtgtgtatgggctcaccaaaggctttagtagtgacatgcgtgacattgtggataatgctattgaaggtgatcctgtatgccgccttgcattagatgtgtacgaatatcgtatcgcgaaatatattggcgcatacgctgcggccatgaacggtgttgacgcgatcgtctttaccgcaggagttggcgaaaatagcccgattatgcgcgaagaaattattgagaactacttgggctacttagggatcaagatcgataaagaagccaatgacactaaaggtgaggagaagatcatttcaacgcccgattccaaagtgattgcgatggtagttccgaccaacgaggagctcatgatcgccaaagacacgaaagaaatcattgagaaagggttggacgagcttaagatc

SEQ ID NO: 798 - protein, 417 aa, synthetic construct
  REGION 1..417: note = variant of acetate kinase from Marinitoga sp. 38H-ov
MHHHHHHGGSGMKVLVINSGSSSIKYQLLDMTNEKVLAKGLVERIGIDGSRIVHKVNGEKHVLEHEIKNHEIGLKLVLDLLTDEKYGVLKDLKEIDAVGHRVVHGGERFASSVKITDEVLKTIETLSFLAPLHNPANIMGIKSSMKVLPGVPQVAVFDTAFHQKMPEKAYLYAIPYEYYEKYKIRRYGFHGTSHRYVSKRAAEIMGKPYDQLKIITVHVGNGASVAAVKNGVSVDTSMGFTPLEGLVMGTRSGDIDPAIVEFLEKEEGLSAKEVVNILNKKSGVYGLTKGFSSDMRDIVDNAIEGDPVCRLALDVYEYRIAKYIGAYAAAMNGVDAIVFTAGVGENSPIMREEIIENYLGYLGIKIDKEANDTKGEEKIISTPDSKVIAMVVPTNEELMIAKDTKEIIEKGLDELKI

SEQ ID NO: 799 - DNA, 1251 bp, synthetic construct
  misc_feature 1..1251: note = variant of acetate kinase from Marinitoga sp. 38H-ov
  source 1..1251: mol_type = other DNA
atgcaccatcatcatcatcatggcggtagcggcatgaaagttctggtgattaattctggtagctcctccatcaaatatcagctcctcgatatgaccaacgaaaaggtattagcgaaaggcttggtcgagcgcattggcatcgacggttcgcgtatcgtgcataaagttaacggcgaaaaacacgtgctggaacatgagattaagaatcacgaaattggacttaaattggtcctggatcttcttacggacgaaaaatacggtgtgttgaaggatctcaaagaaatcgatgcagttgggcatcgcgtagtacatggcggcgagcgttttgccagtagcgtgaagattactgacgaagtcttaaagaccatcgagacgttgtcgttcttagctccgttacacaatccagcgaacattatgggtatcaagagcagcatgaaagtgttaccgggtgtgcctcaagttgccgtctttgatacagcgttccaccagaagatgccggagaaagcctatttgtacgcaatcccctatgagtactacgagaaatataaaattcgccgctatgggtttcatggaacctcacatcgttatgtgagtaaacgtgctgcggaaattatgggcaaaccgtacgatcagctcaagatcattaccgttcacgtgggtaacggcgcatcagttgcggcggtgaagaatggcgtatctgttgacacttccatgggtttcacaccacttgaaggtcttgtcatgggcacgcgcagcggcgatattgatccggccatcgtggaatttcttgagaaagaagaaggattgtcggccaaagaagtcgtcaacatcctcaacaagaaatctggtgtgtatgggctcaccaaaggctttagtagtgacatgcgtgacattgtggatcatgctattgaaggtgatcctgtatgccgccttgcattagatgtgtacgaatatcgtatcgcgaaatatattggcgcatacgctgcggccatgaacggtgttgacgcgatcgtctttaccgcaggagttggcgaaaatagcccgattatgcgcgaagaaattattgagaactacttgggctacttagggatcaagatcgataaagaagccaatgacttcaaaggtgaggagaagatcatttcaacgcccgattccaaagtgattgcgatggtagttccgaccaacgaggagctcatgatcgccaaagacacgaaagaaatcattgagaaagggttggacgagcttaagatc

SEQ ID NO: 800 - protein, 417 aa, synthetic construct
  REGION 1..417: note = variant of acetate kinase from Marinitoga sp. 38H-ov
MHHHHHHGGSGMKVLVINSGSSSIKYQLLDMTNEKVLAKGLVERIGIDGSRIVHKVNGEKHVLEHEIKNHEIGLKLVLDLLTDEKYGVLKDLKEIDAVGHRVVHGGERFASSVKITDEVLKTIETLSFLAPLHNPANIMGIKSSMKVLPGVPQVAVFDTAFHQKMPEKAYLYAIPYEYYEKYKIRRYGFHGTSHRYVSKRAAEIMGKPYDQLKIITVHVGNGASVAAVKNGVSVDTSMGFTPLEGLVMGTRSGDIDPAIVEFLEKEEGLSAKEVVNILNKKSGVYGLTKGFSSDMRDIVDHAIEGDPVCRLALDVYEYRIAKYIGAYAAAMNGVDAIVFTAGVGENSPIMREEIIENYLGYLGIKIDKEANDFKGEEKIISTPDSKVIAMVVPTNEELMIAKDTKEIIEKGLDELKI

SEQ ID NO: 801 - DNA, 1251 bp, synthetic construct
  misc_feature 1..1251: note = variant of acetate kinase from Marinitoga sp. 38H-ov
  source 1..1251: mol_type = other DNA
atgcaccatcatcatcatcatggcggtagcggcatgaaagttctggtgattaattctggtagctcctccatcaaatatcagctcctcgatatgaccaacgaaaaggtattagcgaaaggcttggtcgagcgcattggcatcgacggttcgcgtatcgtgcataaagttaacggcgaaaaacacgtgctggaacatgagattaagaatcacgaaattggacttaaattggtcctggatcttcttacggacgaaaaatacggtgtgttgaaggatctcaaagaaatcgatgcagttgggcatcgcgtagtacatggcggcgagcgttttgccagtagcgtgaagattactgacgaagtcttaaagaccatcgagacgttgtcgttcttagctccgttacacaatccagcgaacattatgggtatcaagagcagcatgaaagtgttaccgggtgtgcctcaagttgccgtctttgatacagcgttccaccagaagatgccggagaaagcctatttgtacgcaatcccctatgagtactacgagaaatataaaattcgccgctatgggtttcatggaacctcacatcgttatgtgagtaaacgtgctgcggaaattatgggcaaaccgtacgatcagctcaagatcattaccgttcacgtgggtaacggcgcatcacatgcggcggtgaagaatggcgtatctgttgacacttccatgggtttcacaccacttgaaggtcttgtcatgggcacgcgcagcggcgatattgatccggccatcgtggaatttcttgagaaagaagaaggattgtcggccaaagaagtcgtcaacatcctcaacaagaaatctggtgtgtatgggctcaccaaaggctttagtagtgacatgcgtgacattgtggataatgctattgaaggtgatcctgtatgccgccttgcattagatgtgtacgaatatcgtatcgcgaaatatattggcgcatacgctgcggccatgaacggtgttgacgcgatcgtctttaccgcaggagttggcgaaaatagcccgattatgcgcgaagaaattattgagaactacttgggctacttagggatcaagatcgataaagaagccaatgacttcaaaggtgaggagaagatcatttcaacgcccgattccaaagtgattgcgatggtagttccgaccaacgaggagctcatgatcgccaaagacacgaaagaaatcattgagaaagggttggacgagcttaagatc

SEQ ID NO: 802 - protein, 417 aa, synthetic construct
  REGION 1..417: note = variant of acetate kinase from Marinitoga sp. 38H-ov
MHHHHHHGGSGMKVLVINSGSSSIKYQLLDMTNEKVLAKGLVERIGIDGSRIVHKVNGEKHVLEHEIKNHEIGLKLVLDLLTDEKYGVLKDLKEIDAVGHRVVHGGERFASSVKITDEVLKTIETLSFLAPLHNPANIMGIKSSMKVLPGVPQVAVFDTAFHQKMPEKAYLYAIPYEYYEKYKIRRYGFHGTSHRYVSKRAAEIMGKPYDQLKIITVHVGNGASHAAVKNGVSVDTSMGFTPLEGLVMGTRSGDIDPAIVEFLEKEEGLSAKEVVNILNKKSGVYGLTKGFSSDMRDIVDNAIEGDPVCRLALDVYEYRIAKYIGAYAAAMNGVDAIVFTAGVGENSPIMREEIIENYLGYLGIKIDKEANDFKGEEKIISTPDSKVIAMVVPTNEELMIAKDTKEIIEKGLDELKI

SEQ ID NO: 803 - DNA, 1251 bp, synthetic construct
  misc_feature 1..1251: note = variant of acetate kinase from Marinitoga sp. 38H-ov
  source 1..1251: mol_type = other DNA
atgcaccatcatcatcatcatggcggtagcggaatgaaagttctggtgattaattctggtagctcctccatcaaatatcagctcctcgatatgaccaacgaaaaggtattagcgaaaggcttggtcgagcgcattggcatcgacggttcgcgtatcgtgcataaagttaacggcgaagggcacgtgctggaacatgagattaaaaatcacgaaattggacttaaattggtcctggatcttcttacggacgaaaaatacggtgtgttgaaggatctcaaagaaatcgatgcagttgggcatcgcgtagtacatggcggcgagcgttttgccagtagcgtgaagattactgacgaagtcttaaagaccatcgagacgttgtcgttcttagctccgttacacaatccagcgaacattatgggtatcaagagcagcatgaaagtgttaccgggtgtgcctcaagttgccgtctttgatacagcgttccaccagaagatgccggagaaagcctatttgtacgcaatcccctatgagtactacgagaaatataaaattcgccgctatgggtttcatggaacctcacatcgttatgtgagtaaacgtgctgcggaaattatgggcaaaccgtacgatcagctcaagatcattaccgttcacgtgggtaacggcgcatcagttgcggcggtgaagaatggcgtatctgttgacacttccatgggtttcacaccacttgaaggtcttgtcatgggcacgcgcagcggcgatattgatccggccatcgtggaatttcttgagaaagaagaaggattgtcggccaaagaagtcgtcaacatcctcaacaagaaatctggtgtgtatgggctcaccaaaggctttagtagtgacatgcgtgacattgtgctgaaggctattgaaggtgatcctgtatgccgccttgcattagatgtgtattattatcgtatcgcgaaatatattggcgcatacgctgcggccatgaacggtgttgacgcgatcgtctttaccgcaggagttggcgaaaatagcccgattgcgcgcgaagaaattattgagaactacttgggctacttagggatcaagatcgataaagaagccaatgacttcaaaggtgaggagaagatcatttcaacgcccgattccaaagtgattgcgatggtagttccgaccaacgaggagctcatgatcgccaaagacacgaaagaaatcattgagaaagggttggacgagcttaagatc

SEQ ID NO: 804 - protein, 417 aa, synthetic construct
  REGION 1..417: note = variant of acetate kinase from Marinitoga sp. 38H-ov
MHHHHHHGGSGMKVLVINSGSSSIKYQLLDMTNEKVLAKGLVERIGIDGSRIVHKVNGEGHVLEHEIKNHEIGLKLVLDLLTDEKYGVLKDLKEIDAVGHRVVHGGERFASSVKITDEVLKTIETLSFLAPLHNPANIMGIKSSMKVLPGVPQVAVFDTAFHQKMPEKAYLYAIPYEYYEKYKIRRYGFHGTSHRYVSKRAAEIMGKPYDQLKIITVHVGNGASVAAVKNGVSVDTSMGFTPLEGLVMGTRSGDIDPAIVEFLEKEEGLSAKEVVNILNKKSGVYGLTKGFSSDMRDIVLKAIEGDPVCRLALDVYYYRIAKYIGAYAAAMNGVDAIVFTAGVGENSPIAREEIIENYLGYLGIKIDKEANDFKGEEKIISTPDSKVIAMVVPTNEELMIAKDTKEIIEKGLDELKI

SEQ ID NO: 805 - DNA, 1251 bp, synthetic construct
  misc_feature 1..1251: note = variant of acetate kinase from Marinitoga sp. 38H-ov
  source 1..1251: mol_type = other DNA
atgcaccatcatcatcatcatggcggtagcggcatgaaagttctggtgattaattctggtagctcctccatcaaatatcagctcctcgatatgaccaacgaaaaggtattagcgaaaggcttggtcgagcgcattggcatcgacggttcgcgtatcgtgcataaagttaacggcgaagggcacgtgctggaacatgagattaaaaatcacgaaattggacttaaattggtcctggatcttcttacggacgaaaaatacggtgtgttgaaggatctcaaagaaatcgatgcagttgggcatcgcgtagtacatggcggcgagcgttttgccagtagcgtgaagattactgacgaagtcttaaagaccatcgagacgttgtcgttcttagctccgttacacaatccagcgaacattatgggtatcaagagcagcatgaaagtgttaccgggtgtgcctcaagttgccgtctttgatacagcgttccaccagaagatgccggagaaagcctatttgtacgcaatcccctatgagtactacgagaaatataaaattcgccgctatgggtttcatggaacctcacatcgttatgtgagtaaacgtgctgcggaaattatgggcaaaccgtacgatcagctcaagatcattaccgttcacgtgggtaacggcgcatcagttgcggcggtgaagaatggcgtatctgttgacacttccatgggtttcacaccacttgaaggtcttgtcatgggcacgcgcagcggcgatattgatccggccatcgtggaatttcttgagaaagaagaaggattgtcggccaaagaagtcgtcaacatcctcaacaagaaatctggtgtgtatgggctcaccaaaggctttagtagtgacatgcgtgacattgtgctgaaggctattgaaggtgatcctgtatgccgccttgcattagatgtgtattattatcgtatcgcgaaatatattggcgcatacgctgcggccatgaacggtgttgacgcgatcgtctttaccgcaggagttggcgaaaatagcccgattatgcgcgaagaaattattgagaactacttgggctacttagggatcaagatcgataaagaagccaatgacttcaaaggttatgagaagatcatttcaacgcccgattccaaagtgattgcgatggtagttccgaccaacgaggagctcatgatcgccaaagacacgaaagaaatcattgagaaagggttggacgagcttaagatc

SEQ ID NO: 806 - protein, 417 aa, synthetic construct
  REGION 1..417: note = variant of acetate kinase from Marinitoga sp. 38H-ov
MHHHHHHGGSGMKVLVINSGSSSIKYQLLDMTNEKVLAKGLVERIGIDGSRIVHKVNGEGHVLEHEIKNHEIGLKLVLDLLTDEKYGVLKDLKEIDAVGHRVVHGGERFASSVKITDEVLKTIETLSFLAPLHNPANIMGIKSSMKVLPGVPQVAVFDTAFHQKMPEKAYLYAIPYEYYEKYKIRRYGFHGTSHRYVSKRAAEIMGKPYDQLKIITVHVGNGASVAAVKNGVSVDTSMGFTPLEGLVMGTRSGDIDPAIVEFLEKEEGLSAKEVVNILNKKSGVYGLTKGFSSDMRDIVLKAIEGDPVCRLALDVYYYRIAKYIGAYAAAMNGVDAIVFTAGVGENSPIMREEIIENYLGYLGIKIDKEANDFKGYEKIISTPDSKVIAMVVPTNEELMIAKDTKEIIEKGLDELKI

SEQ ID NO: 807 - DNA, 1251 bp, synthetic construct
  misc_feature 1..1251: note = variant of acetate kinase from Marinitoga sp. 38H-ov
  source 1..1251: mol_type = other DNA
atgcaccatcatcatcatcatggcggtagcggcatgaaagttctggtgattaattctggtagctcctccatcaaatatcagctcctcgatatgaccaacgaaaaggtattagcgaaaggcttggtcgagcgcattggcatcgacggttcgcgtatcgtgcataaagttaacggcgaagggcacgtgctggaacatgagattaaaaatcacgaaattggacttaaattggtcctggatcttcttacggacgaaaaatacggtgtgttgaaggatctcaaagaaatcgatgcagttgggcatcgcgtagtacatggcggcgagcgttttgccagtagcgtgaagattactgacgaagtcttaaagaccatcgagacgttgtcgttcttagctccgttacacaatccagcgaacattatgggtatcaagagcagcatgaaagtgttaccgggtgtgcctcaagttgccgtctttgatacagcgttccaccagaagatgccggagaaagcctatttgtacgcaatcccctatgagtactacgagaaatataaaattcgccgctatgggtttcatggaacctcacatcgttatgtgagtaaacgtgctgcggaaattatgggcaaaccgtacgatcagctcaagatcattaccgttcacgtgggtaacggcgcatcagttgcggcggtgaagaatggcgtatctgttgacacttccatgggtttcacaccacttgaaggtcttgtcatgggcacgcgcagcggcgatattgatccggccatcgtggaatttcttgagaaagaagaaggattgtcggccaaagaagtcgtcaacatcctcaacaagaaatctggtgtgtatgggctcaccaaaggctttagtagtgacatgcgtgacattgtgctgaaggctattgaaggtgatcctgtatgccgccttgcattagatgtgtattattatcgtatcgcgaaatatattggcgcatacgctgcggccatgaacggtgttgacgcgatcgtctttaccgcaggagttggcgaaaatagcccgattatgcgcgaagaaattattgagaactacttgggctacttagggatcaagatcgataaagaagccaatgacttcaaaggtgaggagaagatcatttcaacgcccgattccaaagtgattgcgatggtagtttcgaccaacgaggagctcatgatcgccaaagacacgaaagaaatcattgagaaagggttggacgagcttaagatc

SEQ ID NO: 808 - protein, 417 aa, synthetic construct
  REGION 1..417: note = variant of acetate kinase from Marinitoga sp. 38H-ov
MHHHHHHGGSGMKVLVINSGSSSIKYQLLDMTNEKVLAKGLVERIGIDGSRIVHKVNGEGHVLEHEIKNHEIGLKLVLDLLTDEKYGVLKDLKEIDAVGHRVVHGGERFASSVKITDEVLKTIETLSFLAPLHNPANIMGIKSSMKVLPGVPQVAVFDTAFHQKMPEKAYLYAIPYEYYEKYKIRRYGFHGTSHRYVSKRAAEIMGKPYDQLKIITVHVGNGASVAAVKNGVSVDTSMGFTPLEGLVMGTRSGDIDPAIVEFLEKEEGLSAKEVVNILNKKSGVYGLTKGFSSDMRDIVLKAIEGDPVCRLALDVYYYRIAKYIGAYAAAMNGVDAIVFTAGVGENSPIMREEIIENYLGYLGIKIDKEANDFKGEEKIISTPDSKVIAMVVSTNEELMIAKDTKEIIEKGLDELKI

SEQ ID NO: 809 - DNA, 1251 bp, synthetic construct
  misc_feature 1..1251: note = variant of acetate kinase from Marinitoga sp. 38H-ov
  source 1..1251: mol_type = other DNA
atgcaccatcatcatcatcatggcggtagcggcatgaaagttctggtgattaattctggtagctcctccatcaaatatcagctcctcgatatgaccaacgaaaaggtattagcgaaaggcttggtcgagcgcattggcatcgacggttcgcgtatcgtgcataaagttaacggcgaagggcacgtgctggaacatgagattaaaaatcacgaaattggacttaaattggtcctggatcttcttacggacgaaaaatacggtgtgttgaaggatctcaaagaaatcgatgcagttgggcatcgcgtagtacatggcggcgagcgttttgccagtagcgtgaagattactgacgaagtcttaaagaccatcgagacgttgtcgttcttagctccgttacacaatccagcgaacattatgggtatcaagagcagcatgaaagtgttaccgggtgtgcctcaagttgccgtctttgatacagcgttccaccagaagatgccggagaaagcctatttgtacgcaatcccctatgagtactacgagaaatataaaattcgccgctatgggtttcatggaacctcacatcgttatgtgagtaaacgtgctgcggaaattatgggcaaaccgtacgatcagctcaagatcattaccgttcacgtgggtaacggcgcatcagttgcggcggtgaagaatggcgtatctgttgacacttccatgggtttcacaccacttgaaggtcttgtcatgggcacgcgcagcggcgatattgatccggccatcgtggaatttcttgagaaagaagaaggattgtcggccaaagaagtcgtcaacatcctcaacaagaaatctggtgtgtatgggctcaccaaaggctttagtagtgacatgcgtgacattgtgctgaaggctattgaaggtgatcctgtatgccgccttgcattagatgtgtattattatcgtatcgcgaaatatattggcgcatacgctgcggccatgaacggtgttgacgcgatcgtctttaccgcaggagttggcgaaaatagcccgattatgcgcgaagaaattattgagaactacttgggctacttagggatcaagatcgataaagaagccaatcctttcaaaggtgaggagaagatcatttcaacgcccgattccaaagtgattgcgatggtagttccgaccaacgaggagctcatgatcgccaaagacacgaaagaaatcattgagaaagggttggacgagcttaagatc

SEQ ID NO: 810 - protein, 417 aa, synthetic construct
  REGION 1..417: note = variant of acetate kinase from Marinitoga sp. 38H-ov
MHHHHHHGGSGMKVLVINSGSSSIKYQLLDMTNEKVLAKGLVERIGIDGSRIVHKVNGEGHVLEHEIKNHEIGLKLVLDLLTDEKYGVLKDLKEIDAVGHRVVHGGERFASSVKITDEVLKTIETLSFLAPLHNPANIMGIKSSMKVLPGVPQVAVFDTAFHQKMPEKAYLYAIPYEYYEKYKIRRYGFHGTSHRYVSKRAAEIMGKPYDQLKIITVHVGNGASVAAVKNGVSVDTSMGFTPLEGLVMGTRSGDIDPAIVEFLEKEEGLSAKEVVNILNKKSGVYGLTKGFSSDMRDIVLKAIEGDPVCRLALDVYYYRIAKYIGAYAAAMNGVDAIVFTAGVGENSPIMREEIIENYLGYLGIKIDKEANPFKGEEKIISTPDSKVIAMVVPTNEELMIAKDTKEIIEKGLDELKI

SEQ ID NO: 811 - DNA, 1251 bp, synthetic construct
  misc_feature 1..1251: note = variant of acetate kinase from Marinitoga sp. 38H-ov
  source 1..1251: mol_type = other DNA
atgcaccatcatcatcatcatggcggtagcggcatgaaagttctggtgattaattctggtagctcctccatcaaatatcagctcctcgatatgaccaacgaaaaggtattagcgaaaggcttggtcgagcgcattggcatcgacggttcgcgtatcgtgcataaagttaacggcgaagggcacgtgctggaacatgagattaaaaatcacgaaattggacttaaattggtcctggatcttcttacggacgaaaaatacggtgtgttgaaggatctcaaagaaatcgatgcagttgggcatcgcgtagtacatggcggcgagcgttttgccagtagcgtgaagattactgacgaagtcttaaagaccatcgagacgttgtcgttcttagctccgttacacaatccagcgaacattatgggtatcaagagcagcatgaaagtgttaccgggtgtgcctcaagttgccgtctttgatacagcgttccaccagaagatgccggagaaagcctatttgtacgcaatcccctatgagtactacgagaaatataaaattcgccgctatgggtttcatggaacctcacatcgttatgtgagtaaacgtgctgcggaaattatgggcaaaccgtacgatcagctcaagatcattaccgttcacgtgggtaacggcgcatcagttgcggcggtgaagaatggcgtatctgttgacacttccatgggtttcacaccacttgaaggtcttgtcatgggcacgcgcagcggcgatattgatccggccatcgtggaatttcttgagaaagaagaaggattgtcggccaaagaagtcgtcaacatcctcctgaagaaatctggtgtgtatgggctcaccaaaggctttagtagtgacatgcgtgacattgtgctgaaggctattgaaggtgatcctgtatgccgccttgcattagatgtgtattattatcgtatcgcgaaatatattggcgcatacgctgcggccatgaacggtgttgacgcgatcgtctttaccgcaggagttggcgaaaatagcccgattatgcgcgaagaaattattgagaactacttgggctacttagggatcaagatcgataaagaagccaatgacttcaaaggtgaggagaagatcatttcaacgcccgattccaaagtgattgcgatggtagttccgaccaacgaggagctcatgatcgccaaagacacgaaagaaatcattgagaaagggttggacgagcttaagatc

SEQ ID NO: 812 - protein, 417 aa, synthetic construct
  REGION 1..417: note = variant of acetate kinase from Marinitoga sp. 38H-ov
MHHHHHHGGSGMKVLVINSGSSSIKYQLLDMTNEKVLAKGLVERIGIDGSRIVHKVNGEGHVLEHEIKNHEIGLKLVLDLLTDEKYGVLKDLKEIDAVGHRVVHGGERFASSVKITDEVLKTIETLSFLAPLHNPANIMGIKSSMKVLPGVPQVAVFDTAFHQKMPEKAYLYAIPYEYYEKYKIRRYGFHGTSHRYVSKRAAEIMGKPYDQLKIITVHVGNGASVAAVKNGVSVDTSMGFTPLEGLVMGTRSGDIDPAIVEFLEKEEGLSAKEVVNILLKKSGVYGLTKGFSSDMRDIVLKAIEGDPVCRLALDVYYYRIAKYIGAYAAAMNGVDAIVFTAGVGENSPIMREEIIENYLGYLGIKIDKEANDFKGEEKIISTPDSKVIAMVVPTNEELMIAKDTKEIIEKGLDELKI

SEQ ID NO: 813 - DNA, 1251 bp, synthetic construct
  misc_feature 1..1251: note = variant of acetate kinase from Marinitoga sp. 38H-ov
  source 1..1251: mol_type = other DNA
atgcaccatcatcatcatcatggcggtagcggcatgaaagttctggtgattaattctggtagctcctccatcaaatatcagctcctcgatatgaccaacgaaaaggtattagcgaaaggcttggtcgagcgcattggcatcgacggttcgcgtatcgtgcataaagttaacggcgaagggcacgtgctggaacatgagattaaaaatcacgaaattggacttaaattggtcctggatcttcttacggacgaaaaatacggtgtgttgaaggatctcaaagaaatcgatgcagttgggcatcgcgtagtacatggcggcgagcgttttgccagtagcgtgaagattactgacgaagtcttaaagaccatcgagacgttgtcgttcttagctccgttacacaatccagcgaacattatgggtatcaagagcagcatgaaagtgttaccgggtgtgcctcaagttgccgtctttgatacagcgttccaccagaagatgccggagaaagcctatttgtacgcaatcccctatgagtactacgagaaatataaaattcgccgctatgggtttcatggaacctcacatcgttatgtgagtaaacgtgctgcggaaattatgggcaaaccgtacgatcagctcaagatcattaccgttcacgtgggtaacggcgcatcagttgcggcggtgaagaatggcgtatctgttgacacttccatgggtttcacaccacttgaaggtcttgtcatgggcacgcgcagcggcgatattgatccggccatcgtggaatttcttgagaaagaagaaggattgtcggccaaagaagtcgtcaacatcctcaacaagaaatctggtgtgtatgggctcaccaaaggctttagtagtgacatgcgtgacattgtgcagaaggctattgaaggtgatcctgtatgccgccttgcattagatgtgtattattatcgtatcgcgaaatatattggcgcatacgctgcggccatgaacggtgttgacgcgatcgtctttaccgcaggagttggcgaaaatagcccgattatgcgcgaagaaattattgagaactacttgggctacttagggatcaagatcgataaagaagccaatgacttcaaaggtgaggagaagatcatttcaacgcccgattccaaagtgattgcgatggtagttccgaccaacgaggagctcatgatcgccaaagacacgaaagaaatcattgagaaagggttggacgagcttaagatc

SEQ ID NO: 814 - protein, 417 aa, synthetic construct
  REGION 1..417: note = variant of acetate kinase from Marinitoga sp. 38H-ov
MHHHHHHGGSGMKVLVINSGSSSIKYQLLDMTNEKVLAKGLVERIGIDGSRIVHKVNGEGHVLEHEIKNHEIGLKLVLDLLTDEKYGVLKDLKEIDAVGHRVVHGGERFASSVKITDEVLKTIETLSFLAPLHNPANIMGIKSSMKVLPGVPQVAVFDTAFHQKMPEKAYLYAIPYEYYEKYKIRRYGFHGTSHRYVSKRAAEIMGKPYDQLKIITVHVGNGASVAAVKNGVSVDTSMGFTPLEGLVMGTRSGDIDPAIVEFLEKEEGLSAKEVVNILNKKSGVYGLTKGFSSDMRDIVQKAIEGDPVCRLALDVYYYRIAKYIGAYAAAMNGVDAIVFTAGVGENSPIMREEIIENYLGYLGIKIDKEANDFKGEEKIISTPDSKVIAMVVPTNEELMIAKDTKEIIEKGLDELKI

SEQ ID NO: 815 - DNA, 1251 bp, synthetic construct
  misc_feature 1..1251: note = variant of acetate kinase from Marinitoga sp. 38H-ov
  source 1..1251: mol_type = other DNA
atgcaccatcatcatcatcatggcggtagcggcatgaaagttctggtgattaattctggtagctcctccatcaaatatcagctcctcgatatgaccaacgaaaaggtattagcgaaaggcttggtcgagcgcattggcatcgacggttcgcgtatcgtgcataaagttaacggcgaagggcacgtgctggaacatgagattaaaaatcacgaaattggacttaaattggtcctggatcttcttacggacgaaaaatacggtgtgttgaaggatctcaaagaaatcgatgcagttgggcatcgcgtagtacatggcggcgagcgttttgccagtagcgtgaagattactgacgaagtcttaaagaccatcgagacgttgtcgttcttagctccgttacacaatccagcgaacattatgggtatcaagagcagcatgaaagtgttaccgggtgtgcctcaagttgccgtctttgatacagcgttccaccagaagatgccggagaaagcctatttgtacgcaatcccctatgagtactacgagaaatataaaattcgccgctatgggtttcatggaacctcacatcgttatgtgagtaaacgtgctgcggaaattatgggcaaaccgtacgatcagctcaagatcattaccgttcacgtgggtaacggcgcatcagttgcggcggtgaagaatggcgtatctgttgacacttccatgggtttcacaccacttgaaggtcttgtcatgggcacgcgcagcggcgatattgatccggccatcgtggaatttcttgagaaagaagaaggattgtcggccaaagaagtcgtcaacatcctcaacaagaaatctggtgtgtatgggctcaccaaaggctttagtagtgacatgcgtgacattgtgatgaaggctattgaaggtgatcctgtatgccgccttgcattagatgtgtattattatcgtatcgcgaaatatattggcgcatacgctgcggccatgaacggtgttgacgcgatcgtctttaccgcaggagttggcgaaaatagcccgattatgcgcgaagaaattattgagaactacttgggctacttagggatcaagatcgataaagaagccaatgacttcaaaggtgaggagaagatcatttcaacgcccgattccaaagtgattgcgatggtagttccgaccaacgaggagctcatgatcgccaaagacacgaaagaaatcattgagaaagggttggacgagcttaagatc

SEQ ID NO: 816 - protein, 417 aa, synthetic construct
  REGION 1..417: note = variant of acetate kinase from Marinitoga sp. 38H-ov
MHHHHHHGGSGMKVLVINSGSSSIKYQLLDMTNEKVLAKGLVERIGIDGSRIVHKVNGEGHVLEHEIKNHEIGLKLVLDLLTDEKYGVLKDLKEIDAVGHRVVHGGERFASSVKITDEVLKTIETLSFLAPLHNPANIMGIKSSMKVLPGVPQVAVFDTAFHQKMPEKAYLYAIPYEYYEKYKIRRYGFHGTSHRYVSKRAAEIMGKPYDQLKIITVHVGNGASVAAVKNGVSVDTSMGFTPLEGLVMGTRSGDIDPAIVEFLEKEEGLSAKEVVNILNKKSGVYGLTKGFSSDMRDIVMKAIEGDPVCRLALDVYYYRIAKYIGAYAAAMNGVDAIVFTAGVGENSPIMREEIIENYLGYLGIKIDKEANDFKGEEKIISTPDSKVIAMVVPTNEELMIAKDTKEIIEKGLDELKI

SEQ ID NO: 817 - DNA, 1251 bp, synthetic construct
  misc_feature 1..1251: note = variant of acetate kinase from Marinitoga sp. 38H-ov
  source 1..1251: mol_type = other DNA
atgcaccatcatcatcatcatggcggtagcggcatgaaagttctggtgattaattctggtagctcctccatcaaatatcagctcctcgatatgaccaacgaaaaggtattagcgaaaggcttggtcgagcgcattggcatcgacggttcgcgtatcgtgcataaagttaacggcgaagggcacgtgctggaacatgagattaaaaatcacgaaattggacttaaattggtcctggatcttcttacggacgaaaaatacggtgtgttgaaggatctcaaagaaatcgatgcagttgggcatcgcgtagtacatggcggcgagcgttttgccagtagcgtgaagattactgacgaagtcttaaagaccatcgagacgttgtcgttcttagctccgttacacaatccagcgaacattatgggtatcaagagcagcatgaaagtgttaccgggtgtgcctcaagttgccgtctttgatacagcgttccaccagaagatgccggagaaagcctatttgtacgcaatcccctatgagtactacgagaaatataaaattcgccgctatgggtttcatggaacctcacatcgttatgtgagtaaacgtgctgcggaaattatgggcaaaccgtacgatcagctcaagatcattaccgttcacgtgggtaacggcgcatcagttgcggcggtgaagaatggcgtatctgttgacacttccatgggtttcacaccacttgaaggtcttgtcatgggcacgcgcagcggcgatattgatccggccatcgtggaatttcttgagaaagaagaaggattgtcggccaaagaagtcgtcaacatcctcaacaagaaatctggtgtgtatgggctcaccaaaggcacgagtagtgacatgcgtgacattgtgctgaaggctattgaaggtgatcctgtatgccgccttgcattagatgtgtattattatcgtatcgcgaaatatattggcgcatacgctgcggccatgaacggtgttgacgcgatcgtctttaccgcaggagttggcgaaaatagcccgattatgcgcgaagaaattattgagaactacttgggctacttagggatcaagatcgataaagaagccaatgacttcaaaggtgaggagaagatcatttcaacgcccgattccaaagtgattgcgatggtagttccgaccaacgaggagctcatgatcgccaaagacacgaaagaaatcattgagaaagggttggacgagcttaagatc

SEQ ID NO: 818 - protein, 417 aa, synthetic construct
  REGION 1..417: note = variant of acetate kinase from Marinitoga sp. 38H-ov
MHHHHHHGGSGMKVLVINSGSSSIKYQLLDMTNEKVLAKGLVERIGIDGSRIVHKVNGEGHVLEHEIKNHEIGLKLVLDLLTDEKYGVLKDLKEIDAVGHRVVHGGERFASSVKITDEVLKTIETLSFLAPLHNPANIMGIKSSMKVLPGVPQVAVFDTAFHQKMPEKAYLYAIPYEYYEKYKIRRYGFHGTSHRYVSKRAAEIMGKPYDQLKIITVHVGNGASVAAVKNGVSVDTSMGFTPLEGLVMGTRSGDIDPAIVEFLEKEEGLSAKEVVNILNKKSGVYGLTKGTSSDMRDIVLKAIEGDPVCRLALDVYYYRIAKYIGAYAAAMNGVDAIVFTAGVGENSPIMREEIIENYLGYLGIKIDKEANDFKGEEKIISTPDSKVIAMVVPTNEELMIAKDTKEIIEKGLDELKI

SEQ ID NO: 819 - DNA, 1251 bp, synthetic construct
  misc_feature 1..1251: note = variant of acetate kinase from Marinitoga sp. 38H-ov
  source 1..1251: mol_type = other DNA
atgcaccatcatcatcatcatggcggtagcggcatgaaagttctggtgattaattctggtagctcctccatcaaatatcagctcctcgatatgaccaacgaaaaggtattagcgaaaggcttggtcgagcgcattggcatcgacggttcgcgtatcgtgcataaagttaacggcgaagggcacgtgctggaacatgagattaaaaatcacgaaattggacttaaattggtcctggatcttcttacggacgaaaaatacggtgtgttgaaggatctcaaagaaatcgatgcagttgggcatcgcgtagtacatggcggcgagcgttttgccagtagcgtgaagattactgacgaagtcttaaagaccatcgagacgttgtcgttcttagctccgttacacaatccagcgaacattatgggtatcaagagcagcatgaaagtgttaccgggtgtgcctcaagttgccgtctttgatacagcgttccaccagaagatgccggagaaagcctatttgtacgcaatcccctatgagtactacgagaaatataaaattcgccgctatgggtttcatggaacctcacatcgttatgtgagtaaacgtgctgcggaaattatgggcaaaccgtacgatcagctcaagatcattaccgttcacgtgggtaacggcgcatcagttgcggcggtgaagaatggcgtatctgttgacacttccatgggtttcacaccacttgaaggtcttgtcatgggcacgcgcagcggcgatattgatccggccatcgtggaatttcttgagaaagaagaaggattgtcggccaaagaagtcgtcaacatcctcaacaagaaatctggtgtgtatgggctcaccaaaggctttagtagtgacatgcgtgacattgtgctgaaggctattgaaggtgatcctgtatgccgccttgcattaagtgtgtattattatcgtatcgcgaaatatattggcgcatacgctgcggccatgaacggtgttgacgcgatcgtctttaccgcaggagttggcgaaaatagcccgattatgcgcgaagaaattattgagaactacttgggctacttagggatcaagatcgataaagaagccaatgacttcaaaggtgaggagaagatcatttcaacgcccgattccaaagtgattgcgatggtagttccgaccaacgaggagctcatgatcgccaaagacacgaaagaaatcattgagaaagggttggacgagcttaagatc

SEQ ID NO: 820 - protein, 417 aa, synthetic construct
  REGION 1..417: note = variant of acetate kinase from Marinitoga sp. 38H-ov
MHHHHHHGGSGMKVLVINSGSSSIKYQLLDMTNEKVLAKGLVERIGIDGSRIVHKVNGEGHVLEHEIKNHEIGLKLVLDLLTDEKYGVLKDLKEIDAVGHRVVHGGERFASSVKITDEVLKTIETLSFLAPLHNPANIMGIKSSMKVLPGVPQVAVFDTAFHQKMPEKAYLYAIPYEYYEKYKIRRYGFHGTSHRYVSKRAAEIMGKPYDQLKIITVHVGNGASVAAVKNGVSVDTSMGFTPLEGLVMGTRSGDIDPAIVEFLEKEEGLSAKEVVNILNKKSGVYGLTKGFSSDMRDIVLKAIEGDPVCRLALSVYYYRIAKYIGAYAAAMNGVDAIVFTAGVGENSPIMREEIIENYLGYLGIKIDKEANDFKGEEKIISTPDSKVIAMVVPTNEELMIAKDTKEIIEKGLDELKI

SEQ ID NO: 821 - DNA, 1251 bp, synthetic construct
  misc_feature 1..1251: note = variant of acetate kinase from Marinitoga sp. 38H-ov
  source 1..1251: mol_type = other DNA
atgcaccatcatcatcatcatggcggtagcggcatgaaagttctggtgattaattctggtagctcctccatcaaatatcagctcctcgatatgaccaacgaaaaggtattagcgaaaggcttggtcgagcgcattggcatcgacggttcgcgtatcgtgcataaagttaacggcgaagggcacgtgctggaacatgagattaaaaatcacgaaattggacttaaattggtcctggatcttcttacggacgaaaaatacggtgtgttgaaggatctcaaagaaatcgatgcagttgggcatcgcgtagtacatggcggcgagcgttttgccagtagcgtgaagattactgacgaagtcttaaagaccatcgagacgttgtcgttcttagctccgttacacaatccagcgaacattatgggtatcaagagcagcatgaaagtgttaccgggtgtgcctcaagttgccgtctttgatacagcgttccaccagaagatgccggagaaagcctatttgtacgcaatcccctatgagtactacgagaaatataaaattcgccgctatgggtttcatggaacctcacatcgttatgtgagtaaacgtgctgcggaaattatgggcaaaccgtacgatcagctcaagatcattaccgttcacgtgggtaacggcgcatcagttgcggcggtgaagaatggcgtatctgttgacacttccatgggtttcacaccacttgaaggtcttgtcatgggcacgcgcagcggcgatattgatccggccatcgtggaatttcttgagaaagaagaaggattgtcggccaaagaagtcgtcaacatcctcaacaagaaatctggtgtgtatgggctcaccaaaggctttagtagtgacatgcgtgacattgtgctgaaggctattgaaggtgatcctgtatgccgccttgcattagatgtgtattattatcgtatcgcgaaatatattggcgcatacgctgcggccatgaacggtgttgacgcgatcgtctttaccgcaggagttggcgaaaatagcccgattatgcgcgaagaaattattgagaactacttgggctacttagggatcaagatcgataaagaagccaattctttcaaaggtgaggagaagatcatttcaacgcccgattccaaagtgattgcgatggtagttccgaccaacgaggagctcatgatcgccaaagacacgaaagaaatcattgagaaagggttggacgagcttaagatc

SEQ ID NO: 822 - protein, 417 aa, synthetic construct
  REGION 1..417: note = variant of acetate kinase from Marinitoga sp. 38H-ov
MHHHHHHGGSGMKVLVINSGSSSIKYQLLDMTNEKVLAKGLVERIGIDGSRIVHKVNGEGHVLEHEIKNHEIGLKLVLDLLTDEKYGVLKDLKEIDAVGHRVVHGGERFASSVKITDEVLKTIETLSFLAPLHNPANIMGIKSSMKVLPGVPQVAVFDTAFHQKMPEKAYLYAIPYEYYEKYKIRRYGFHGTSHRYVSKRAAEIMGKPYDQLKIITVHVGNGASVAAVKNGVSVDTSMGFTPLEGLVMGTRSGDIDPAIVEFLEKEEGLSAKEVVNILNKKSGVYGLTKGFSSDMRDIVLKAIEGDPVCRLALDVYYYRIAKYIGAYAAAMNGVDAIVFTAGVGENSPIMREEIIENYLGYLGIKIDKEANSFKGEEKIISTPDSKVIAMVVPTNEELMIAKDTKEIIEKGLDELKI

SEQ ID NO: 823 - DNA, 1251 bp, synthetic construct
  misc_feature 1..1251: note = variant of acetate kinase from Marinitoga sp. 38H-ov
  source 1..1251: mol_type = other DNA
atgcaccatcatcatcatcatggcggtatcggcatgaaagttctggtgattaattctggtagctcctccatcaaatatcagctcctcgatatgaccaacgaaaaggtattagcgaaaggcttggtcgagcgcattggcatcgacggttcgcgtatcgtgcataaagttaacggcgaagggcacgtgctggaacatgagattaaaaatcacgaaattggacttaaattggtcctggatcttcttacggacgaaaaatacggtgtgttgaaggatctcaaagaaatcgatgcagttgggcatcgcgtagtacatggcggcgagcgttttgccagtagcgtgaagattactgacgaagtcttaaagaccatcgagacgttgtcgttcttagctccgttacacaatccagcgaacattatgggtatcaagagcagcatgaaagtgttaccgggtgtgcctcaagttgccgtctttgatacagcgttccaccagaagatgccggagaaagcctatttgtacgcaatcccctatgagtactacgagaaatataaaattcgccgctatgggtttcatggaacctcacatcgttatgtgagtaaacgtgctgcggaaattatgggcaaaccgtacgatcagctcaagatcattaccgttcacgttggtaacggcgcatcagttgcggcggtgaagaatggcgtatctgttgacacttccatgggtttcacaccacttgaaggtcttgtcatgggcacgcgcagcggcgatattgatccggccatcgtggaatttcttgagaaagaagaaggattgtcggccaaagaagtcgtcaacatcctcaacaagaaatctggtgtgtatgggctcaccaaaggctttagtagtgacatgcgtgacattgtgctgaaggctattgaaggtgatcctgtatgccgccttgcattagatgtgtattattatcgtatcgcgaaatatattggcgcatacgctgcggccatgaacggtgttgacgcgatcgtctttaccgcaggagttggcgaaaatagcccgattatgcgcgaagaaattattgagaactacttgggctacttagggatcaagatcgataaagaagccaatgacttcaaaggtgaggagaagatcatttcaacgcccgattccaaagtgattgcgatggtagttccgaccaacgaggagctcatgatcgccaaagacacgaaagaaatcattgagaaagggttggacgagcttaagatc

SEQ ID NO: 824 - protein, 417 aa, synthetic construct
  REGION 1..417: note = variant of acetate kinase from Marinitoga sp. 38H-ov
MHHHHHHGGIGMKVLVINSGSSSIKYQLLDMTNEKVLAKGLVERIGIDGSRIVHKVNGEGHVLEHEIKNHEIGLKLVLDLLTDEKYGVLKDLKEIDAVGHRVVHGGERFASSVKITDEVLKTIETLSFLAPLHNPANIMGIKSSMKVLPGVPQVAVFDTAFHQKMPEKAYLYAIPYEYYEKYKIRRYGFHGTSHRYVSKRAAEIMGKPYDQLKIITVHVGNGASVAAVKNGVSVDTSMGFTPLEGLVMGTRSGDIDPAIVEFLEKEEGLSAKEVVNILNKKSGVYGLTKGFSSDMRDIVLKAIEGDPVCRLALDVYYYRIAKYIGAYAAAMNGVDAIVFTAGVGENSPIMREEIIENYLGYLGIKIDKEANDFKGEEKIISTPDSKVIAMVVPTNEELMIAKDTKEIIEKGLDELKI

SEQ ID NO: 825 - DNA, 1251 bp, synthetic construct
  misc_feature 1..1251: note = variant of acetate kinase from Marinitoga sp. 38H-ov
  source 1..1251: mol_type = other DNA
atgcaccatcatcatcatcatggcggtagcggcatgaaagttctggtgattaattctggtagctcctccatcaaatatcagctcctcgatatgaccaacgaaaaggtattagcgaaaggcttggtcgagcgcattggcatcgacggttcgcgtatcgtgcataaagttaacggcgaagggcacgtgctggaacatgagattaaaaatcacgaaattggacttaaattggtcctggatcttcttacggacgaaaaatacggtgtgttgaaggatctcaaagaaatcgatgcagttgggcatcgcgtagtacatggcggcgagcgttttgccagtagcgtgaagattactgacgaagtcttaaagaccatcgagacgttgtcgttcttagctccgttacacaatccagcgaacattatgggtatcaagagcagcatgaaagtgttaccgggtgtgcctcaagttgccgtctttgatacagcgttccaccagaagatgccggagaaagcctatttgtacgcaatcccctatgagtactacgagaaatataaaattcgccgctatgggtttcatggaacctcacatcgttatgtgagtaaacgtgctgcggaaattatgggcaaaccgtacgatcagctcaagatcattaccgttcacgtgggtaacggcgcatcagttgcggcggtgaagaatggcgtatctgttgacacttccatgggtttcacaccacttgaaggtcttgtcatgggcacgcgcagcggcgatattgatccggccatcgtggaatttcttgagaaagaagaaggattgtcggccaaagaagtcgtcaacatcctcaacaagaaatctggtgtgcaggggctcaccaaaggctttagtagtgacatgcgtgacattgtgctgaaggctattgaaggtgatcctgtatgccgccttgcattagatgtgtattattatcgtatcgcgaaatatattggcgcatacgctgcggccatgaacggtgttgacgcgatcgtctttaccgcaggagttggcgaaaatagcccgattatgcgcgaagaaattattgagaactacttgggctacttagggatcaagatcgataaagaagccaatgacttcaaaggtgaggagaagatcatttcaacgcccgattccaaagtgattgcgatggtagttccgaccaacgaggagctcatgatcgccaaagacacgaaagaaatcattgagaaagggttggacgagcttaagatc

SEQ ID NO: 826 - protein, 417 aa, synthetic construct
  REGION 1..417: note = variant of acetate kinase from Marinitoga sp. 38H-ov
MHHHHHHGGSGMKVLVINSGSSSIKYQLLDMTNEKVLAKGLVERIGIDGSRIVHKVNGEGHVLEHEIKNHEIGLKLVLDLLTDEKYGVLKDLKEIDAVGHRVVHGGERFASSVKITDEVLKTIETLSFLAPLHNPANIMGIKSSMKVLPGVPQVAVFDTAFHQKMPEKAYLYAIPYEYYEKYKIRRYGFHGTSHRYVSKRAAEIMGKPYDQLKIITVHVGNGASVAAVKNGVSVDTSMGFTPLEGLVMGTRSGDIDPAIVEFLEKEEGLSAKEVVNILNKKSGVQGLTKGFSSDMRDIVLKAIEGDPVCRLALDVYYYRIAKYIGAYAAAMNGVDAIVFTAGVGENSPIMREEIIENYLGYLGIKIDKEANDFKGEEKIISTPDSKVIAMVVPTNEELMIAKDTKEIIEKGLDELKI

SEQ ID NO: 827 - DNA, 1251 bp, synthetic construct
  misc_feature 1..1251: note = variant of acetate kinase from Marinitoga sp. 38H-ov
  source 1..1251: mol_type = other DNA
atgcaccatcatcatcatcatggcggtagcggcatgaaagttctggtgattaattctggtagctcctccatcaaatatcagctcctcgatatgaccaacgaaaaggtattagcgaaaggcttggtcgagcgcattggcatcgacggttcgcgtatcgtgcataaagttaacggcgaagggcacgtgctggaacatgagattaaaaatcacgaaattggacttaaattggtcctggatcttcttacggacgaaaaatacggtgtgttgaaggatctcaaagaaatcgatgcagttgggcatcgcgtagtacatggcggcgagcgttttgccagtagcgtgaagattactgacgaagtcttaaagaccatcgagacgttgtcgttcttagctccgttacacaatccagcgaacattatgggtatcaagagcagcatgaaagtgttaccgggtgtgcctcaagttgccgtctttgatacagcgttccaccagaagatgccggagaaagcctatttgtacgcaatcccctatgagtactacgagaaatataaaattcgccgctatgggtttcatggaacctcacatcgttatgtgagtaaacgtgctgcggaaattatgggcaaaccgtacgatcagctcaagatcattaccgttcacgtgggtaacggcgcatcagttgcggcggtgaagaatggcgtatctgttgacacttccatgggtttcacaccacttgaaggtcttgtcatgggcacgcgcagcggcgatattgatccggccatcgtggaatttcttgagaaagaagaaggattgtcggccaaagaagtcgtcaacatcctcaacaagaaatctggtgtgtatgggctcaccaaaggctttagtagtgacatgcgtgacattgtgctgaaggctattgaaggtgatcctgtatgccgccttgcattagatgtgtattattatcgtatcgcgaaatatattggcgcatacgctgcggccatgaacggtgttgacgcgatcgtctttaccgcaggagttggcgaaaatagcccgattatgcgcgaagaaattattgagaactacttgggctacttagggatcaagatcgataaagaagccaatgacgttaaaggtgaggagaagatcatttcaacgcccgattccaaagtgattgcgatggtagttccgaccaacgaggagctcatgatcgccaaagacacgaaagaaatcattgagaaagggttggacgagcttaagatc

SEQ ID NO: 828 - protein, 417 aa, synthetic construct
  REGION 1..417: note = variant of acetate kinase from Marinitoga sp. 38H-ov
MHHHHHHGGSGMKVLVINSGSSSIKYQLLDMTNEKVLAKGLVERIGIDGSRIVHKVNGEGHVLEHEIKNHEIGLKLVLDLLTDEKYGVLKDLKEIDAVGHRVVHGGERFASSVKITDEVLKTIETLSFLAPLHNPANIMGIKSSMKVLPGVPQVAVFDTAFHQKMPEKAYLYAIPYEYYEKYKIRRYGFHGTSHRYVSKRAAEIMGKPYDQLKIITVHVGNGASVAAVKNGVSVDTSMGFTPLEGLVMGTRSGDIDPAIVEFLEKEEGLSAKEVVNILNKKSGVYGLTKGFSSDMRDIVLKAIEGDPVCRLALDVYYYRIAKYIGAYAAAMNGVDAIVFTAGVGENSPIMREEIIENYLGYLGIKIDKEANDVKGEEKIISTPDSKVIAMVVPTNEELMIAKDTKEIIEKGLDELKI

SEQ ID NO: 829 - DNA, 1251 bp, synthetic construct
  misc_feature 1..1251: note = variant of acetate kinase from Marinitoga sp. 38H-ov
  source 1..1251: mol_type = other DNA
atgcaccatcatcatcatcatggcggtagcggcatgaaagttctggtgattaattctggtagctcctccatcaaatatcagctcctcgatatgaccaacgaaaaggtattagcgaaaggcttggtcgagcgcattggcatcgacggttcgcgtatcgtgcataaagttaacggcgaagggcacgtgctggaacatgagattaaaaatcacgaaattggacttaaattggtcctggatcttcttacggacgaaaaatacggtgtgttgaaggatctcaaagaaatcgatgcagttgggcatcgcgtagtacatggcggcgagcgttttgccagtagcgtgaagattactgacgaagtcttaaagaccatcgagacgttgtcgttcttagctccgttacacaatccagcgaacattatgggtatcaagagcagcatgaaagtgttaccgggtgtgcctcaagttgccgtctttgatacagcgttccaccagaagatgccggagaaagcctatttgtacgcaatcccctatgagtactacgagaaatataaaattcgccgctatgggtttcatggaacctcacatcgttatgtgagtaaacgtgctgcggaaattatgggcaaaccgtacgatcagctcaagatcattaccgttcacgtgggtaacggcgcatcagttgcggcggtgaagaatggcgtatctgttgacacttccatgggtttcacaccacttgaaggtcttgtcatgggcacgcgcagcggcgatattgatccggccatcgtggaatttcttgagaaagaagaaggattgtcggccaaagaagtcgtcaacatcctcaacaagaaatctggtgtgtatgggctcaccaaaggctttagtagtgacatgcgtgacattgtgctgaaggctattgaaggtgatcctgtatgccgccttgcattagatgtgtattggtatcgtatcgcgaaatatattggcgcatacgctgcggccatgaacggtgttgacgcgatcgtctttaccgcaggagttggcgaaaatagcccgattatgcgcgaagaaattattgagaactacttgggctacttagggatcaagatcgataaagaagccaatgacttcaaaggtgaggagaagatcatttcaacgcccgattccaaagtgattgcgatggtagttccgaccaacgaggagctcatgatcgccaaagacacgaaagaaatcattgagaaagggttggacgagcttaagatc

SEQ ID NO: 830 - protein, 417 aa, synthetic construct
  REGION 1..417: note = variant of acetate kinase from Marinitoga sp. 38H-ov
MHHHHHHGGSGMKVLVINSGSSSIKYQLLDMTNEKVLAKGLVERIGIDGSRIVHKVNGEGHVLEHEIKNHEIGLKLVLDLLTDEKYGVLKDLKEIDAVGHRVVHGGERFASSVKITDEVLKTIETLSFLAPLHNPANIMGIKSSMKVLPGVPQVAVFDTAFHQKMPEKAYLYAIPYEYYEKYKIRRYGFHGTSHRYVSKRAAEIMGKPYDQLKIITVHVGNGASVAAVKNGVSVDTSMGFTPLEGLVMGTRSGDIDPAIVEFLEKEEGLSAKEVVNILNKKSGVYGLTKGFSSDMRDIVLKAIEGDPVCRLALDVYWYRIAKYIGAYAAAMNGVDAIVFTAGVGENSPIMREEIIENYLGYLGIKIDKEANDFKGEEKIISTPDSKVIAMVVPTNEELMIAKDTKEIIEKGLDELKI

SEQ ID NO: 831 - DNA, 1251 bp, synthetic construct
  misc_feature 1..1251: note = variant of acetate kinase from Marinitoga sp. 38H-ov
  source 1..1251: mol_type = other DNA
atgcaccatcatcatcatcatggcggtagcggcatgaaagttctggtgattaattctggtagctcctccatcaaatatcagctcctcgatatgaccaacgaaaaggtattagcgaaaggcttggtcgagcgcattggcatcgacggttcgcgtatcgtgcataaagttaacggcgaagggcacgtgctggaacatgagattaaaaatcacgaaattggacttaaattggtcctggatcttcttacggacgaaaaatacggtgtgttgaaggatctcaaagaaatcgatgcagttgggcatcgcgtagtacatggcggcgagcgttttgccagtagcgtgaagattactgacgaagtcttaaagaccatcgagacgttgtcgttcttagctccgttacacaatccagcgaacattatgggtatcaagagcagcatgaaagtgttaccgggtgtgcctcaagttgccgtctttgatacagcgttccaccagaagatgccggagaaagcctatttgtacgcaatcccctatgagtactacgagaaatataaaattcgccgctatgggtttcatggaacctcacatcgttatgtgagtaaacgtgctgcggaaattatgggcaaaccgtacgatcagctcaagatcattaccgttcacgtgggtaacggcgcatcagttgcggcggtgaagaatggcgtatctgttgacacttcccagggtttcacaccacttgaaggtcttgtcatgggcacgcgcagcggcgatattgatccggccatcgtggaatttcttgagaaagaagaaggattgtcggccaaagaagtcgtcaacatcctcaacaagaaatctggtgtgtatgggctcaccaaaggctttagtagtgacatgcgtgacattgtgctgaaggctattgaaggtgatcctgtatgccgccttgcattagatgtgtattattatcgtatcgcgaaatatattggcgcatacgctgcggccatgaacggtgttgacgcgatcgtctttaccgcaggagttggcgaaaatagcccgattatgcgcgaagaaattattgagaactacttgggctacttagggatcaagatcgataaagaagccaatgacttcaaaggtgaggagaagatcatttcaacgcccgattccaaagtgattgcgatggtagttccgaccaacgaggagctcatgatcgccaaagacacgaaagaaatcattgagaaagggttggacgagcttaagatc

SEQ ID NO: 832 - protein, 417 aa, synthetic construct
  REGION 1..417: note = variant of acetate kinase from Marinitoga sp. 38H-ov
MHHHHHHGGSGMKVLVINSGSSSIKYQLLDMTNEKVLAKGLVERIGIDGSRIVHKVNGEGHVLEHEIKNHEIGLKLVLDLLTDEKYGVLKDLKEIDAVGHRVVHGGERFASSVKITDEVLKTIETLSFLAPLHNPANIMGIKSSMKVLPGVPQVAVFDTAFHQKMPEKAYLYAIPYEYYEKYKIRRYGFHGTSHRYVSKRAAEIMGKPYDQLKIITVHVGNGASVAAVKNGVSVDTSQGFTPLEGLVMGTRSGDIDPAIVEFLEKEEGLSAKEVVNILNKKSGVYGLTKGFSSDMRDIVLKAIEGDPVCRLALDVYYYRIAKYIGAYAAAMNGVDAIVFTAGVGENSPIMREEIIENYLGYLGIKIDKEANDFKGEEKIISTPDSKVIAMVVPTNEELMIAKDTKEIIEKGLDELKI

SEQ ID NO: 833 - DNA, 1251 bp, synthetic construct
  misc_feature 1..1251: note = variant of acetate kinase from Marinitoga sp. 38H-ov
  source 1..1251: mol_type = other DNA
atgcaccatcatcatcatcatggcggtagcggcatgaaagttctggtgattaattctggtagctcctccatcaaatatcagctcctcgatatgaccaacgaaaaggtattagcgaaaggcttggtcgagcgcattggcatcgacggttcgcgtatcgtgcataaagttaacggcgaagggcacgtgctggaacatgagattaaaaatcacgaaattggacttaaattggtcctggatcttcttacggacgaaaaatacggtgtgttgaaggatctcaaagaaatcgatgcagttgggcatcgcgtagtacatggcggcgagcgttttgccagtagcgtgaagattactgacgaagtcttaaagaccatcgagacgttgtcgttcttagctccgttacacaatccagcgaacattatgggtatcaagagcagcatgaaagtgttaccgggtgtgcctcaagttgccgtctttgatacagcgttccaccagaagatgccggagaaagcctatttgtacgcaatcccctatgagtactacgagaaatataaaattcgccgctatgggtttcatggaacctcacatcgttatgtgagtaaacgtgctgcggaaattatgggcaaaccgtacgatcagctcaagatcattagtgttcacgtgggtaacggcgcatcagttgcggcggtgaagaatggcgtatctgttgacacttccatgggtttcacaccacttgaaggtcttgtcatgggcacgcgcagcggcgatattgatccggccatcgtggaatttcttgagaaagaagaaggattgtcggccaaagaagtcgtcaacatcctcaacaagaaatctggtgtgtatgggctcaccaaaggctttagtagtgacatgcgtgacattgtgctgaaggctattgaaggtgatcctgtatgccgccttgcattagatgtgtattattatcgtatcgcgaaatatattggcgcatacgctgcggccatgaacggtgttgacgcgatcgtctttaccgcaggagttggcgaaaatagcccgattatgcgcgaagaaattattgagaactacttgggctacttagggatcaagatcgataaagaagccaatgacttcaaaggtgaggagaagatcatttcaacgcccgattccaaagtgattgcgatggtagttccgaccaacgaggagctcatgatcgccaaagacacgaaagaaatcattgagaaagggttggacgagcttaagatc

SEQ ID NO: 834 - protein, 417 aa, synthetic construct
  REGION 1..417: note = variant of acetate kinase from Marinitoga sp. 38H-ov
MHHHHHHGGSGMKVLVINSGSSSIKYQLLDMTNEKVLAKGLVERIGIDGSRIVHKVNGEGHVLEHEIKNHEIGLKLVLDLLTDEKYGVLKDLKEIDAVGHRVVHGGERFASSVKITDEVLKTIETLSFLAPLHNPANIMGIKSSMKVLPGVPQVAVFDTAFHQKMPEKAYLYAIPYEYYEKYKIRRYGFHGTSHRYVSKRAAEIMGKPYDQLKIISVHVGNGASVAAVKNGVSVDTSMGFTPLEGLVMGTRSGDIDPAIVEFLEKEEGLSAKEVVNILNKKSGVYGLTKGFSSDMRDIVLKAIEGDPVCRLALDVYYYRIAKYIGAYAAAMNGVDAIVFTAGVGENSPIMREEIIENYLGYLGIKIDKEANDFKGEEKIISTPDSKVIAMVVPTNEELMIAKDTKEIIEKGLDELKI

SEQ ID NO: 835 - DNA, 1251 bp, synthetic construct
  misc_feature 1..1251: note = variant of acetate kinase from Marinitoga sp. 38H-ov
  source 1..1251: mol_type = other DNA
atgcaccatcatcatcatcatggcggtagcggcatgaaagttctggtgattaattctggtagctcctccatcaaatatcagctcctcgatatgaccaacgaaaaggtattagcgaaaggcttggtcgagcgcattggcatcgacggttcgcgtatcgtgcataaagttaacggcgaagggcacgtgctggaacatgagattaaaaatcacgaaattggacttaaattggtcctggatcttcttacggacgaaaaatacggtgtgttgaaggatctcaaagaaatcgatgcagttgggcatcgcgtagtacatggcggcgagcgttttgccagtagcgtgaagattactgacgaagtcttaaagaccatcgagacgttgtcgttcttagctccgttacacaatccagcgaacattatgggtatcaagagcagcatgaaagtgttaccgggtgtgcctcaagttgccgtctttgatacagcgttccaccagaagatgccggagaaagcctatttgtacgcaatcccctatgagtactacgagaaatataaaattcgccgctatgggtttcatggaacctcacatcgttatgtgagtaaacgtgctgcggaaattatgggcaaaccgtacgatcagctcaagatcattaccgttcacgtgggtaacggcgcatcagttgcggcggtgaagaatggcgtatctgttgacacttccatgggtttcacaccacttgaaggtcttgtcatgggcacgcgcagcggcgatattgatccggccatcgtggaatttcttgagaaagaagaaggattgtcggccaaagaagtcgtcaacatcctcaacaagaaatctggtgtgtatgggctcaccaaaggctttagtagtgacatgcgtgacattgtgctgaaggctatttctggtgatcctgtatgccgccttgcattagatgtgtattattatcgtatcgcgaaatatattggcgcatacgctgcggccatgaacggtgttgacgcgatcgtctttaccgcaggagttggcgaaaatagcccgattatgcgcgaagaaattattgagaactacttgggctacttagggatcaagatcgataaagaagccaatgacttcaaaggtgaggagaagatcatttcaacgcccgattccaaagtgattgcgatggtagttccgaccaacgaggagctcatgatcgccaaagacacgaaagaaatcattgagaaagggttggacgagcttaagatc

SEQ ID NO: 836 - protein, 417 aa, synthetic construct
  REGION 1..417: note = variant of acetate kinase from Marinitoga sp. 38H-ov
MHHHHHHGGSGMKVLVINSGSSSIKYQLLDMTNEKVLAKGLVERIGIDGSRIVHKVNGEGHVLEHEIKNHEIGLKLVLDLLTDEKYGVLKDLKEIDAVGHRVVHGGERFASSVKITDEVLKTIETLSFLAPLHNPANIMGIKSSMKVLPGVPQVAVFDTAFHQKMPEKAYLYAIPYEYYEKYKIRRYGFHGTSHRYVSKRAAEIMGKPYDQLKIITVHVGNGASVAAVKNGVSVDTSMGFTPLEGLVMGTRSGDIDPAIVEFLEKEEGLSAKEVVNILNKKSGVYGLTKGFSSDMRDIVLKAISGDPVCRLALDVYYYRIAKYIGAYAAAMNGVDAIVFTAGVGENSPIMREEIIENYLGYLGIKIDKEANDFKGEEKIISTPDSKVIAMVVPTNEELMIAKDTKEIIEKGLDELKI

SEQ ID NO: 837 - DNA, 1251 bp, synthetic construct
  misc_feature 1..1251: note = variant of acetate kinase from Marinitoga sp. 38H-ov
  source 1..1251: mol_type = other DNA
atgcaccatcatcatcatcatggcggtagcggcatgaaagttctggtgattaattctggtagctcctccatcaaatatcagctcctcgatatgaccaacgaaaaggtattagcgaaaggcttggtcgagcgcattggcatcgacggttcgcgtatcgtgcataaagttaacggcgaagggcacgtgctggaacatgagattaaaaatcacgaaattggacttaaattggtcctggatcttcttacggacgaaaaatacggtgtgttgaaggatctcaaagaaatcgatgcagttgggcatcgcgtagtacatggcggcgagcgttttgccagtagcgtgaagattactgacgaagtcttaaagaccatcgagacgttgtcgttcttagctccgttacacaatccagcgaacattatgggtatcaagagcagcatgaaagtgttaccgggtgtgcctcaagttgccgtctttgatacagcgttccaccagaagatgccggagaaagcctatttgtacgcaatcccctatgagtactacgagaaatataaaattcgccgctatgggtttcatggaacctcacatcgttatgtgagtaaacgtgctgcggaaattatgggcaaaccgtacgatcagctcaagatcattaccgttcacgtgggtaacggcgcatcagttgcggcggtgaagaatggcgtatctgttgacacttccatgggtttcacaccacttgaaggtcttgtcatgggcacgcgcagcggcgatattgatccggccatcgtggaatttcttgagaaagaagaaggattgtcggccaaagaagtcgtcaacatcctcaacaagaaatctggtgtgtatgggctcaccaaaggctttagtagtgacatgcgtgacattgtgctgaaggctattcagggtgatcctgtatgccgccttgcattagatgtgtattattatcgtatcgcgaaatatattggcgcatacgctgcggccatgaacggtgttgacgcgatcgtctttaccgcaggagttggcgaaaatagcccgattatgcgcgaagaaattattgagaactacttgggctacttagggatcaagatcgataaagaagccaatgacttcaaaggtgaggagaagatcatttcaacgcccgattccaaagtgattgcgatggtagttccgaccaacgaggagctcatgatcgccaaagacacgaaagaaatcattgagaaagggttggacgagcttaagatc

SEQ ID NO: 838 - protein, 417 aa, synthetic construct
  REGION 1..417: note = variant of acetate kinase from Marinitoga sp. 38H-ov
MHHHHHHGGSGMKVLVINSGSSSIKYQLLDMTNEKVLAKGLVERIGIDGSRIVHKVNGEGHVLEHEIKNHEIGLKLVLDLLTDEKYGVLKDLKEIDAVGHRVVHGGERFASSVKITDEVLKTIETLSFLAPLHNPANIMGIKSSMKVLPGVPQVAVFDTAFHQKMPEKAYLYAIPYEYYEKYKIRRYGFHGTSHRYVSKRAAEIMGKPYDQLKIITVHVGNGASVAAVKNGVSVDTSMGFTPLEGLVMGTRSGDIDPAIVEFLEKEEGLSAKEVVNILNKKSGVYGLTKGFSSDMRDIVLKAIQGDPVCRLALDVYYYRIAKYIGAYAAAMNGVDAIVFTAGVGENSPIMREEIIENYLGYLGIKIDKEANDFKGEEKIISTPDSKVIAMVVPTNEELMIAKDTKEIIEKGLDELKI

SEQ ID NO: 839 - DNA, 1251 bp, synthetic construct
  misc_feature 1..1251: note = variant of acetate kinase from Marinitoga sp. 38H-ov
  source 1..1251: mol_type = other DNA
atgcaccatcatcatcatcatggcggtagcggcatgaaagttctggtgattaattctggtagctcctccatcaaatatcagctcctcgatatgaccaacgaaaaggtattagcgaaaggcttggtcgagcgcattggcatcgacggttcgcgtatcgtgcataaagttaacggcgaagggcacgtgctggaacatgagattaaaaatcacgaaattggacttaaattggtcctggatcttcttacggacgaaaaatacggtgtgttgaaggatctcaaagaaatcgatgcagttgggcatcgcgtagtacatggcggcgagcgttttgccagtagcgtgaagattactgacgaagtcttaaagaccatcgagacgttgtcgttcttagctccgttacacaatccagcgaacattatgggtatcaagagcagcatgaaagtgttaccgggtgtgcctcaagttgccgtctttgatacagcgttccaccagaagatgccggagaaagcctatttgtacgcaatcccctatgagtactacgagaaatataaaattcgccgctatgggtttcatggaacctcacatcgttatgtgagtaaacgtgctgcggaaattatgggcaaaccgtacgatcagctcaagatcattaccgttcacgtgggtaacggcgcatcagttgcggcggtgaagaatggcgtatctgttgacacttccatgggtttcacaccacttgaaggtcttgtcatgggcacgcgcagcggcgatattgatccggccatcgtggaatttcttgagaaagaagaaggattgtcggccaaagaagtcgtcaacatcctcaacaagaaatctggtgtgtatgggctcaccaaaggctttagtagtgacatgcgtgacattgtgctgaaggctattgaaggtgatcctgtatgccgccttgcattagatgtgtattattatcgtatcgcgaaatatattggcgcatacgctgcggccatgaacggtgttgacgcgatcgtctttaccgcaggagttggcgaaaatagcccgattgtgcgcgaagaaattattgagaactacttgggctacttagggatcaagatcgataaagaagccaatgacttcaaaggtgaggagaagatcatttcaacgcccgattccaaagtgattgcgatggtagttccgaccaacgaggagctcatgatcgccaaagacacgaaagaaatcattgagaaagggttggacgagcttaagatc

SEQ ID NO: 840 - protein, 417 aa, synthetic construct
  REGION 1..417: note = variant of acetate kinase from Marinitoga sp. 38H-ov
MHHHHHHGGSGMKVLVINSGSSSIKYQLLDMTNEKVLAKGLVERIGIDGSRIVHKVNGEGHVLEHEIKNHEIGLKLVLDLLTDEKYGVLKDLKEIDAVGHRVVHGGERFASSVKITDEVLKTIETLSFLAPLHNPANIMGIKSSMKVLPGVPQVAVFDTAFHQKMPEKAYLYAIPYEYYEKYKIRRYGFHGTSHRYVSKRAAEIMGKPYDQLKIITVHVGNGASVAAVKNGVSVDTSMGFTPLEGLVMGTRSGDIDPAIVEFLEKEEGLSAKEVVNILNKKSGVYGLTKGFSSDMRDIVLKAIEGDPVCRLALDVYYYRIAKYIGAYAAAMNGVDAIVFTAGVGENSPIVREEIIENYLGYLGIKIDKEANDFKGEEKIISTPDSKVIAMVVPTNEELMIAKDTKEIIEKGLDELKI

SEQ ID NO: 841 - DNA, 1251 bp, synthetic construct
  misc_feature 1..1251: note = variant of acetate kinase from Marinitoga sp. 38H-ov
  source 1..1251: mol_type = other DNA
atgcaccatcatcatcatcatggcggtagcggcatgaaagttctggtgattaattctggtagctcctccatcaaatatcagctcctcgatatgaccaacgaaaaggtattagcgaaaggcttggtcgagcgcattggcatcgacggttcgcgtatcgtgcataaagttaacggcgaagggcacgtgctggaacatgagattaaaaatcacgaaattggacttaaattggtcctggatcttcttacggacgaaaaatacggtgtgttgaaggatctcaaagaaatcgatgcagttgggcatcgcgtagtacatggcggcgagcgttttgccagtagcgtgaagattactgacgaagtcttaaagaccatcgagacgttgtcgttcttagctccgttacacaatccagcgaacattatgggtatcaagagcagcatgaaagtgttaccgggtgtgcctcaagttgccgtctttgatacagcgttccaccagaagatgccggagaaagcctatttgtacgcaatcccctatgagtactacgagaaatataaaattcgccgctatgggtttcatggaacctcacatcgttatgtgagtaaacgtgctgcggaaattatgggcaaaccgtacgatcagctcaagatcattaccgttcacgtgggtaacggcgcatcagttgcggcggtgaagaatggcgtatctgttgacacttccatgggtttcacaccacttgaaggtcttgtcatgggcacgcgcagcggcgatattgatccggccatcgtggaatttcttgagaaagaagaaggattgtcggccaaagaagtcgtcaacatcctcaacaagaaatctggtgtgtatgggctcaccaaaggctttagtagtgacatgcgtgacattgtgctgaaggctattgaaggtgatcctgtaatgcgccttgcattagatgtgtattattatcgtatcgcgaaatatattggcgcatacgctgcggccatgaacggtgttgacgcgatcgtctttaccgcaggagttggcgaaaatagcccgattatgcgcgaagaaattattgagaactacttgggctacttagggatcaagatcgataaagaagccaatgacttcaaaggtgaggagaagatcatttcaacgcccgattccaaagtgattgcgatggtagttccgaccaacgaggagctcatgatcgccaaagacacgaaagaaatcattgagaaagggttggacgagcttaagatc

SEQ ID NO: 842 - protein, 417 aa, synthetic construct
  REGION 1..417: note = variant of acetate kinase from Marinitoga sp. 38H-ov
MHHHHHHGGSGMKVLVINSGSSSIKYQLLDMTNEKVLAKGLVERIGIDGSRIVHKVNGEGHVLEHEIKNHEIGLKLVLDLLTDEKYGVLKDLKEIDAVGHRVVHGGERFASSVKITDEVLKTIETLSFLAPLHNPANIMGIKSSMKVLPGVPQVAVFDTAFHQKMPEKAYLYAIPYEYYEKYKIRRYGFHGTSHRYVSKRAAEIMGKPYDQLKIITVHVGNGASVAAVKNGVSVDTSMGFTPLEGLVMGTRSGDIDPAIVEFLEKEEGLSAKEVVNILNKKSGVYGLTKGFSSDMRDIVLKAIEGDPVMRLALDVYYYRIAKYIGAYAAAMNGVDAIVFTAGVGENSPIMREEIIENYLGYLGIKIDKEANDFKGEEKIISTPDSKVIAMVVPTNEELMIAKDTKEIIEKGLDELKI

SEQ ID NO: 843 - DNA, 1251 bp, synthetic construct
  misc_feature 1..1251: note = variant of acetate kinase from Marinitoga sp. 38H-ov
  source 1..1251: mol_type = other DNA
atgcaccatcatcatcatcatggcggtagcggcatgaaagttctggtgattaattctggtagctcctccatcaaatatcagctcctcgatatgaccaacgaaaaggtattagcgaaaggcttggtcgagcgcattggcatcgacggttcgcgtatcgtgcataaagttaacggcgaagggcacgtgctggaacatgagattaaaaatcacgaaattggacttaaattggtcctggatcttcttacggacgaaaaatacggtgtgttgaaggatctcaaagaaatcgatgcagttgggcatcgcgtagtacatggcggcgagcgttttgccagtagcgtgaagattactgacgaagtcttaaagaccatcgagacgttgtcgttcttagctccgttacacaatccagcgaacattatgggtatcaagagcagcatgaaagtgttaccgggtgtgcctcaagttgccgtctttgatacagcgttccaccagaagatgccggagaaagcctatttgtacgcaatcccctatgagtactacgagaaatataaaattcgccgctatgggtttcatggaacctcacatcgttatgtgagtaaacgtgctgcggaaattatgggcaaaccgtacgatcagctcaagatcattaccgttcacgtgggtaacggcgcatcagttgcggcggtgaagaatggcgtatctgttgacacttccatgggtttcacaccacttgaaggtcttgtcatgggcacgcgcagcggcgatattgatccggccatcgtggaatttcttgagaaagaagaaggattgtcggccaaagaagtcgtcaacatcctctcgaagaaatctggtgtgtatgggctcaccaaaggctttagtagtgacatgcgtgacattgtgctgaaggctattgaaggtgatcctgtatgccgccttgcattagatgtgtattattatcgtatcgcgaaatatattggcgcatacgctgcggccatgaacggtgttgacgcgatcgtctttaccgcaggagttggcgaaaatagcccgattatgcgcgaagaaattattgagaactacttgggctacttagggatcaagatcgataaagaagccaatgacttcaaaggtgaggagaagatcatttcaacgcccgattccaaagtgattgcgatggtagttccgaccaacgaggagctcatgatcgccaaagacacgaaagaaatcattgagaaagggttggacgagcttaagatc

SEQ ID NO: 844 - protein, 417 aa, synthetic construct
  REGION 1..417: note = variant of acetate kinase from Marinitoga sp. 38H-ov
MHHHHHHGGSGMKVLVINSGSSSIKYQLLDMTNEKVLAKGLVERIGIDGSRIVHKVNGEGHVLEHEIKNHEIGLKLVLDLLTDEKYGVLKDLKEIDAVGHRVVHGGERFASSVKITDEVLKTIETLSFLAPLHNPANIMGIKSSMKVLPGVPQVAVFDTAFHQKMPEKAYLYAIPYEYYEKYKIRRYGFHGTSHRYVSKRAAEIMGKPYDQLKIITVHVGNGASVAAVKNGVSVDTSMGFTPLEGLVMGTRSGDIDPAIVEFLEKEEGLSAKEVVNILSKKSGVYGLTKGFSSDMRDIVLKAIEGDPVCRLALDVYYYRIAKYIGAYAAAMNGVDAIVFTAGVGENSPIMREEIIENYLGYLGIKIDKEANDFKGEEKIISTPDSKVIAMVVPTNEELMIAKDTKEIIEKGLDELKI

SEQ ID NO: 845 - DNA, 1251 bp, synthetic construct
  misc_feature 1..1251: note = variant of acetate kinase from Marinitoga sp. 38H-ov
  source 1..1251: mol_type = other DNA
atgcaccatcatcatcatcatggcggtagcggcatgaaagttctggtgattaattctggtagctcctccatcaaatatcagctcctcgatatgaccaacgaaaaggtattagcgaaaggcttggtcgagcgcattggcatcgacggttcgcgtatcgtgcataaagttaacggcgaagggcacgtgctggaacatgagattaaaaatcacgaaattggacttaaattggtcctggatcttcttacggacgaaaaatacggtgtgttgaaggatctcaaagaaatcgatgcagttgggcatcgcgtagtacatggcggcgagcgttttgccagtagcgtgaagattactgacgaagtcttaaagaccatcgagacgttgtcgttcttagctccgttacacaatccagcgaacattatgggtatcaagagcagcatgaaagtgttaccgggtgtgcctcaagttgccgtctttgatacagcgttccaccagaagatgccggagaaagcctatttgtacgcaatcccctatgagtactacgagaaatataaaattcgccgctatgggtttcatggaacctcacatcgttatgtgagtaaacgtgctgcggaaattatgggcaaaccgtacgatcagctcaagatcattaccgttcacgtgggtaacggcgcatcagttgcggcggtgaagaatggcgtatctgttgacacttccatgggtttcacaccacttgaaggtcttgtcatgggcacgcgcagcggcgatattgatccggccatcgtggaatttcttgagaaagaagaaggattgtcggccaaagaagtcgtcaacatcctcaacaagaaatctggtgtgtatgggctcaccaaaggctttagtagggacatgcgtgacattgtgctgaaggctattgaaggtgatcctgtatgccgccttgcattagatgtgtattattatcgtatcgcgaaatatattggcgcatacgctgcggccatgaacggtgttgacgcgatcgtctttaccgcaggagttggcgaaaatagcccgattatgcgcgaagaaattattgagaactacttgggctacttagggatcaagatcgataaagaagccaatgacttcaaaggtgaggagaagatcatttcaacgcccgattccaaagtgattgcgatggtagttccgaccaacgaggagctcatgatcgccaaagacacgaaagaaatcattgagaaagggttggacgagcttaagatc

SEQ ID NO: 846 - protein, 417 aa, synthetic construct
  REGION 1..417: note = variant of acetate kinase from Marinitoga sp. 38H-ov
MHHHHHHGGSGMKVLVINSGSSSIKYQLLDMTNEKVLAKGLVERIGIDGSRIVHKVNGEGHVLEHEIKNHEIGLKLVLDLLTDEKYGVLKDLKEIDAVGHRVVHGGERFASSVKITDEVLKTIETLSFLAPLHNPANIMGIKSSMKVLPGVPQVAVFDTAFHQKMPEKAYLYAIPYEYYEKYKIRRYGFHGTSHRYVSKRAAEIMGKPYDQLKIITVHVGNGASVAAVKNGVSVDTSMGFTPLEGLVMGTRSGDIDPAIVEFLEKEEGLSAKEVVNILNKKSGVYGLTKGFSRDMRDIVLKAIEGDPVCRLALDVYYYRIAKYIGAYAAAMNGVDAIVFTAGVGENSPIMREEIIENYLGYLGIKIDKEANDFKGEEKIISTPDSKVIAMVVPTNEELMIAKDTKEIIEKGLDELKI

SEQ ID NO: 847 - DNA, 1251 bp, synthetic construct
  misc_feature 1..1251: note = variant of acetate kinase from Marinitoga sp. 38H-ov
  source 1..1251: mol_type = other DNA
atgcaccatcatcatcatcatggcggtagcggcatgaaagttctggtgattaattctggtagctcctccatcaaatatcagctcctcgatatgaccaacgaaaaggtattagcgaaaggcttggtcgagcgcattggcatcgacggttcgcgtatcgtgcataaagttaacggcgaagggcacgtgctggaacatgagattaaaaatcacgaaattggacttaaattggtcctggatcttcttacggacgaaaaatacggtgtgttgaaggatctcaaagaaatcgatgcagttgggcatcgcgtagtacatggcggcgagcgttttgccagtagcgtgaagattactgacgaagtcttaaagaccatcgagacgttgtcgttcttagctccgttacacaatccagcgaacattatgggtatcaagagcagcatgaaagtgttaccgggtgtgcctcaagttgccgtctttgatacagcgttccaccagaagatgccggagaaagcctatttgtacgcaatcccctatgagtactacgagaaatataaaattcgccgctatgggtttcatggaacctcacatcgttatgtgagtaaacgtgctgcggaaattatgggcaaaccgtacgatcagctcaagatcattaccgttcacgtgggtaacggcgcatcagttgcggcggtgaagaatggcgtatctgttgacacttccatgggtttcacaccacttgaaggtccggtcatgggcacgcgcagcggcgatattgatccggccatcgtggaatttcttgagaaagaagaaggattgtcggccaaagaagtcgtcaacatcctcaacaagaaatctggtgtgtatgggctcaccaaaggctttagtagtgacatgcgtgacattgtgctgaaggctattgaaggtgatcctgtatgccgccttgcattagatgtgtattattatcgtatcgcgaaatatattggcgcatacgctgcggccatgaacggtgttgacgcgatcgtctttaccgcaggagttggcgaaaatagcccgattatgcgcgaagaaattattgagaactacttgggctacttagggatcaagatcgataaagaagccaatgacttcaaaggtgaggagaagatcatttcaacgcccgattccaaagtgattgcgatggtagttccgaccaacgaggagctcatgatcgccaaagacacgaaagaaatcattgagaaagggttggacgagcttaagatc

SEQ ID NO: 848 - protein, 417 aa, synthetic construct
  REGION 1..417: note = variant of acetate kinase from Marinitoga sp. 38H-ov
MHHHHHHGGSGMKVLVINSGSSSIKYQLLDMTNEKVLAKGLVERIGIDGSRIVHKVNGEGHVLEHEIKNHEIGLKLVLDLLTDEKYGVLKDLKEIDAVGHRVVHGGERFASSVKITDEVLKTIETLSFLAPLHNPANIMGIKSSMKVLPGVPQVAVFDTAFHQKMPEKAYLYAIPYEYYEKYKIRRYGFHGTSHRYVSKRAAEIMGKPYDQLKIITVHVGNGASVAAVKNGVSVDTSMGFTPLEGPVMGTRSGDIDPAIVEFLEKEEGLSAKEVVNILNKKSGVYGLTKGFSSDMRDIVLKAIEGDPVCRLALDVYYYRIAKYIGAYAAAMNGVDAIVFTAGVGENSPIMREEIIENYLGYLGIKIDKEANDFKGEEKIISTPDSKVIAMVVPTNEELMIAKDTKEIIEKGLDELKI

SEQ ID NO: 849 - DNA, 1251 bp, synthetic construct
  misc_feature 1..1251: note = variant of acetate kinase from Marinitoga sp. 38H-ov
  source 1..1251: mol_type = other DNA
atgcaccatcatcatcatcatggcggtagcggcatgaaagttctggtgattaattctggtagctcctccatcaaatatcagctcctcgatatgaccaacgaaaaggtattagcgaaaggcttggtcgagcgcattggcatcgacggttcgcgtatcgtgcataaagttaacggcgaagggcacgtgctggaacatgagattaaaaatcacgaaattggacttaaattggtcctggatcttcttacggacgaaaaatacggtgtgttgaaggatctcaaagaaatcgatgcagttgggcatcgcgtagtacatggcggcgagcgttttgccagtagcgtgaagattactgacgaagtcttaaagaccatcgagacgttgtcgttcttagctccgttacacaatccagcgaacattatgggtatcaagagcagcatgaaagtgttaccgggtgtgcctcaagttgccgtctttgatacagcgttccaccagaagatgccggagaaagcctatttgtacgcaatcccctatgagtactacgagaaatataaaattcgccgctatgggtttcatggaacctcacatcgttatgtgagtaaacgtgctgcggaaattatgggcaaaccgtacgatcagctcaagatcattaccgttcacgtgggtaacggcgcatcagttgcggcggtgaagaatggcgtatctgttgacacttccatgggtttcacaccacttgaaggtcttgtcatgggcacgcgcagcggcgatattgatccggccatcgtggaatttcttgagaaagaagaaggattgtcggccaaagaagtcgtcaacatcctcaacaagaaatctggtgtgtatgggctcaccaaaggctttagtagtgacatgcgtgacattgtgctgaaggctattgaaggtgatcctgtatgccgccttgcattaggggtgtattattatcgtatcgcgaaatatattggcgcatacgctgcggccatgaacggtgttgacgcgatcgtctttaccgcaggagttggcgaaaatagcccgattatgcgcgaagaaattattgagaactacttgggctacttagggatcaagatcgataaagaagccaatgacttcaaaggtgaggagaagatcatttcaacgcccgattccaaagtgattgcgatggtagttccgaccaacgaggagctcatgatcgccaaagacacgaaagaaatcattgagaaagggttggacgagcttaagatc

SEQ ID NO: 850 - protein, 417 aa, synthetic construct
  REGION 1..417: note = variant of acetate kinase from Marinitoga sp. 38H-ov
MHHHHHHGGSGMKVLVINSGSSSIKYQLLDMTNEKVLAKGLVERIGIDGSRIVHKVNGEGHVLEHEIKNHEIGLKLVLDLLTDEKYGVLKDLKEIDAVGHRVVHGGERFASSVKITDEVLKTIETLSFLAPLHNPANIMGIKSSMKVLPGVPQVAVFDTAFHQKMPEKAYLYAIPYEYYEKYKIRRYGFHGTSHRYVSKRAAEIMGKPYDQLKIITVHVGNGASVAAVKNGVSVDTSMGFTPLEGLVMGTRSGDIDPAIVEFLEKEEGLSAKEVVNILNKKSGVYGLTKGFSSDMRDIVLKAIEGDPVCRLALGVYYYRIAKYIGAYAAAMNGVDAIVFTAGVGENSPIMREEIIENYLGYLGIKIDKEANDFKGEEKIISTPDSKVIAMVVPTNEELMIAKDTKEIIEKGLDELKI

SEQ ID NO: 851 - DNA, 1251 bp, synthetic construct
  misc_feature 1..1251: note = variant of acetate kinase from Marinitoga sp. 38H-ov
  source 1..1251: mol_type = other DNA
atgcaccatcatcatcatcatggcggtagcggcatgaaagttctggtgattaattctggtagctcctccatcaaatatgggctcctcgatatgaccaacgaaaaggtattagcgaaaggcttggtcgagcgcattggcatcgacggttcgcgtatcgtgcataaagttaacggcgaagggcacgtgctggaacatgagattaaaaatcacgaaattggacttaaattggtcctggatcttcttacggacgaaaaatacggtgtgttgaaggatctcaaagaaatcgatgcagttgggcatcgcgtagtacatggcggcgagcgttttgccagtagcgtgaagattactgacgaagtcttaaagaccatcgagacgttgtcgttcttagctccgttacacaatccagcgaacattatgggtatcaagagcagcatgaaagtgttaccgggtgtgcctcaagttgccgtctttgatacagcgttccaccagaagatgccggagaaagcctatttgtacgcaatcccctatgagtactacgagaaatataaaattcgccgctatgggtttcatggaacctcacatcgttatgtgagtaaacgtgctgcggaaattatgggcaaaccgtacgatcagctcaagatcattaccgttcacgtgggtaacggcgcatcagttgcggcggtgaagaatggcgtatctgttgacacttccatgggtttcacaccacttgaaggtcttgtcatgggcacgcgcagcggcgatattgatccggccatcgtggaatttcttgagaaagaagaaggattgtcggccaaagaagtcgtcaacatcctcaacaagaaatctggtgtgtatgggctcaccaaaggctttagtagtgacatgcgtgacattgtgctgaaggctattgaaggtgatcctgtatgccgccttgcattagatgtgtattattatcgtatcgcgaaatatattggcgcatacgctgcggccatgaacggtgttgacgcgatcgtctttaccgcaggagttggcgaaaatagcccgattatgcgcgaagaaattattgagaactacttgggctacttagggatcaagatcgataaagaagccaatgacttcaaaggtgaggagaagatcatttcaacgcccgattccaaagtgattgcgatggtagttccgaccaacgaggagctcatgatcgccaaagacacgaaagaaatcattgagaaagggttggacgagcttaagatc

SEQ ID NO: 852 - protein, 417 aa, synthetic construct
  REGION 1..417: note = variant of acetate kinase from Marinitoga sp. 38H-ov
MHHHHHHGGSGMKVLVINSGSSSIKYGLLDMTNEKVLAKGLVERIGIDGSRIVHKVNGEGHVLEHEIKNHEIGLKLVLDLLTDEKYGVLKDLKEIDAVGHRVVHGGERFASSVKITDEVLKTIETLSFLAPLHNPANIMGIKSSMKVLPGVPQVAVFDTAFHQKMPEKAYLYAIPYEYYEKYKIRRYGFHGTSHRYVSKRAAEIMGKPYDQLKIITVHVGNGASVAAVKNGVSVDTSMGFTPLEGLVMGTRSGDIDPAIVEFLEKEEGLSAKEVVNILNKKSGVYGLTKGFSSDMRDIVLKAIEGDPVCRLALDVYYYRIAKYIGAYAAAMNGVDAIVFTAGVGENSPIMREEIIENYLGYLGIKIDKEANDFKGEEKIISTPDSKVIAMVVPTNEELMIAKDTKEIIEKGLDELKI

SEQ ID NO: 853 - DNA, 1251 bp, synthetic construct
  misc_feature 1..1251: note = variant of acetate kinase from Marinitoga sp. 38H-ov
  source 1..1251: mol_type = other DNA
atgcaccatcatcatcatcatggcggtagcggcatgaaagttctggtgattaattctggtagctcctccatcaaatatcagctcctcgatatgaccaacgaaaaggtattagcgaaaggcttggtcgagcgcattggcatcgacggttcgcgtatcgtgcataaagttaacggcgaagggcacgtgctggaacatgagattaaaaatcacgaaattggacttaaattggtcctggatcttcttacggacgaaaaatacggtgtgttgaaggatctcaaagaaatcgatgcagttgggcatcgcgtagtacatggcggcgagcgttttgccagtagcgtgaagattactgacgaagtcttaaagaccatcgagacgttgtcgttcttagctccgttacacaatccagcgaacattatgggtatcaagagcagcatgaaagtgttaccgggtgtgcctcaagttgccgtctttgatacagcgttccaccagaagatgccggagaaagcctatttgtacgcaatcccctatgagtactacgagaaatataaaattcgccgctatgggtttcatggaacctcacatcgttatgtgagtaaacgtgctgcggaaattatgggcaaaccgtacgatcagctcaagatcattaccgttcacgtgggtaacggcgcatcagttgcggcggtgaagaatggcgtatctgttgacacttccatgggtttcacaccacttgaaggtcttgtcatgggcacgcgcagcggcgatattgatccggccatcgtggaatttcttgagaaagaagaaggattgtcggccaaagaagtcgtcaacatcctcaacaagaaatctggtgtgtatgggctcaccaaaggctttagtagtgacatgcgtgacattgtgctgaaggctattgaaggtgatcctgtatgccgccttgcattagatgtgtattattatcgtatcgcgaaatatattggcgcatacgctgcggccatgaacggtgttgacgcgatcgtctttaccgcaggagttggcgaaaatagcccgattatgcgcgaagaaattattgagaactacttgggctacttagggatcaagatcgataaagaagccaatgacttcaaaggtgaggagaagatcatttcaacgcccgattccaaagtgattgcgatgcgggttccgaccaacgaggagctcatgatcgccaaagacacgaaagaaatcattgagaaagggttggacgagcttaagatc

SEQ ID NO: 854 - protein, 417 aa, synthetic construct
  REGION 1..417: note = variant of acetate kinase from Marinitoga sp. 38H-ov
MHHHHHHGGSGMKVLVINSGSSSIKYQLLDMTNEKVLAKGLVERIGIDGSRIVHKVNGEGHVLEHEIKNHEIGLKLVLDLLTDEKYGVLKDLKEIDAVGHRVVHGGERFASSVKITDEVLKTIETLSFLAPLHNPANIMGIKSSMKVLPGVPQVAVFDTAFHQKMPEKAYLYAIPYEYYEKYKIRRYGFHGTSHRYVSKRAAEIMGKPYDQLKIITVHVGNGASVAAVKNGVSVDTSMGFTPLEGLVMGTRSGDIDPAIVEFLEKEEGLSAKEVVNILNKKSGVYGLTKGFSSDMRDIVLKAIEGDPVCRLALDVYYYRIAKYIGAYAAAMNGVDAIVFTAGVGENSPIMREEIIENYLGYLGIKIDKEANDFKGEEKIISTPDSKVIAMRVPTNEELMIAKDTKEIIEKGLDELKI

SEQ ID NO: 855 - DNA, 1251 bp, synthetic construct
  misc_feature 1..1251: note = variant of acetate kinase from Marinitoga sp. 38H-ov
  source 1..1251: mol_type = other DNA
atgcaccatcatcatcatcatggcggtagcggcatgaaagttctggtgattaattctggtagctcctccatcaaatatcagctcctcgatatgaccaacgaaaaggtattagcgaaaggcttggtcgagcgcattggcatcgacggttcgcgtatcgtgcataaagttaacggcgaagggcacgtgctggaacatgagattaaaaatcacgaaattggacttaaattggtcctggatcttcttacggacgaaaaatacggtgtgttgaaggatctcaaagaaatcgatgcagttgggcatcgcgtagtacatggcggcgagcgttttgccagtagcgtgaagattactgacgaagtcttaaagaccatcgagacgttgtcgttcttagctccgttacacaatccagcgaacattatgggtatcaagagcagcatgaaagtgttaccgggtgtgcctcaagttgccgtctttgatacagcgttccaccagaagatgccggagaaagcctatttgtacgcaatcccctatgagtactacgagaaatataaaattcgccgctatgggtttcatggaacctcacatcgttatgtgagtaaacgtgctgcggaaattatgggcaaaccgtacgatcagctcaagatcattaccgttcacgtgggtaacggcgcatcagttgcggcggtgaagaatggcgtatctgttgacacttccatgggtttcacaccacttgaaggtcttgtcatgggcacgcgcagcggcgatattgatccggccatcgtggaatttcttgagaaagaagaaggattgtcggccaaagaagtcgtcaacatcctcaacaagaaatctggtgtgtatgggctcaccaaaggctttagtagtgacatgcgtgacattgtgctgaaggctattgaaggtgatcctgtatgccgccttgcattagatgtgtatatttatcgtatcgcgaaatatattggcgcatacgctgcggccatgaacggtgttgacgcgatcgtctttaccgcaggagttggcgaaaatagcccgattatgcgcgaagaaattattgagaactacttgggctacttagggatcaagatcgataaagaagccaatgacttcaaaggtgaggagaagatcatttcaacgcccgattccaaagtgattgcgatggtagttccgaccaacgaggagctcatgatcgccaaagacacgaaagaaatcattgagaaagggttggacgagcttaagatc

SEQ ID NO: 856 - protein, 417 aa, synthetic construct
  REGION 1..417: note = variant of acetate kinase from Marinitoga sp. 38H-ov
MHHHHHHGGSGMKVLVINSGSSSIKYQLLDMTNEKVLAKGLVERIGIDGSRIVHKVNGEGHVLEHEIKNHEIGLKLVLDLLTDEKYGVLKDLKEIDAVGHRVVHGGERFASSVKITDEVLKTIETLSFLAPLHNPANIMGIKSSMKVLPGVPQVAVFDTAFHQKMPEKAYLYAIPYEYYEKYKIRRYGFHGTSHRYVSKRAAEIMGKPYDQLKIITVHVGNGASVAAVKNGVSVDTSMGFTPLEGLVMGTRSGDIDPAIVEFLEKEEGLSAKEVVNILNKKSGVYGLTKGFSSDMRDIVLKAIEGDPVCRLALDVYIYRIAKYIGAYAAAMNGVDAIVFTAGVGENSPIMREEIIENYLGYLGIKIDKEANDFKGEEKIISTPDSKVIAMVVPTNEELMIAKDTKEIIEKGLDELKI

SEQ ID NO: 857 - DNA, 1251 bp, synthetic construct
  misc_feature 1..1251: note = variant of acetate kinase from Marinitoga sp. 38H-ov
  source 1..1251: mol_type = other DNA
atgcaccatcatcatcatcatggcggtagcggcatgaaagttctggtgattaattctggtagctcctccatcaaatatcagctcctcgatatgaccaacgaaaaggtattagcgaaaggcttggtcgagcgcattggcatcgacggttcgcgtatcgtgcataaagttaacggcgaagggcacgtgctggaacatgagattaaaaatcacgaaattggacttaaattggtcctggatcttcttacggacgaaaaatacggtgtgttgaaggatctcaaagaaatcgatgcagttgggcatcgcgtagtacatggcggcgagcgttttgccagtagcgtgaagattactgacgaagtcttaaagaccatcgagacgttgtcgttcttagctccgttacacaatccagcgaacattatgggtatcaagagcagcatgaaagtgttaccgggtgtgcctcaagttgccgtctttgatacagcgttccaccagaagatgccggagaaagcctatttgtacgcaatcccctatgagtactacgagaaatataaaattcgccgctatgggtttcatggaacctcacatcgttatgtgagtaaacgtgctgcggaaattatgggcaaaccgtacgatcagctcaagatcattaccgttcacgtgggtaacggcgcatcagttgcggcggtgaagaatggcgtatctgttgacacttccatgggtttcacaccacttgaaggtcttgtcatgggcacgcgcagcggcgatattgatccggccatcgtggaatttcttgagaaagaagaaggattgtcggccaaagaagtcgtcaacatcctcaacaagaaatctggtgtgtatgggctcaccaaaggctttagtagtgacatgcgtgacattgtgctgaaggctattgaaggtgatcctgtatgccgccttgcattagatgtgtattattatcgtatcgcgaaatatattggcgcatacgctgcggccatgaacggtgttgacgcgatcgtctttaccgcaggagttggcgaaaatagcccgattatgcgcgaagaaattattgagaactacttgggctacttagggatcaagatcgataaagaagccaatgacttcaaaggtgaggagaagatcatttcaacgcccgattccaaagtgattgcgatggtagttcagaccaacgaggagctcatgatcgccaaagacacgaaagaaatcattgagaaagggttggacgagcttaagatc

SEQ ID NO: 858 - protein, 417 aa, synthetic construct
  REGION 1..417: note = variant of acetate kinase from Marinitoga sp. 38H-ov
MHHHHHHGGSGMKVLVINSGSSSIKYQLLDMTNEKVLAKGLVERIGIDGSRIVHKVNGEGHVLEHEIKNHEIGLKLVLDLLTDEKYGVLKDLKEIDAVGHRVVHGGERFASSVKITDEVLKTIETLSFLAPLHNPANIMGIKSSMKVLPGVPQVAVFDTAFHQKMPEKAYLYAIPYEYYEKYKIRRYGFHGTSHRYVSKRAAEIMGKPYDQLKIITVHVGNGASVAAVKNGVSVDTSMGFTPLEGLVMGTRSGDIDPAIVEFLEKEEGLSAKEVVNILNKKSGVYGLTKGFSSDMRDIVLKAIEGDPVCRLALDVYYYRIAKYIGAYAAAMNGVDAIVFTAGVGENSPIMREEIIENYLGYLGIKIDKEANDFKGEEKIISTPDSKVIAMVVQTNEELMIAKDTKEIIEKGLDELKI

SEQ ID NO: 859 - DNA, 1251 bp, synthetic construct
  misc_feature 1..1251: note = variant of acetate kinase from Marinitoga sp. 38H-ov
  source 1..1251: mol_type = other DNA
atgcaccatcatcatcatcatggcggtagcggcatgaaagttctggtgattaattctggtagctcctccatcaaatatcagctcctcgatatgaccaacgaaaaggtattagcgaaaggcttggtcgagcgcattggcatcgacggttcgcgtatcgtgcataaagttaacggcgaagggcacgtgctggaacatgagattaaaaatcacgaaattggacttaaattggtcctggatcttcttacggacgaaaaatacggtgtgttgaaggatctcaaagaaatcgatgcagttgggcatcgcgtagtacatggcggcgagcgttttgccagtagcgtgaagattactgacgaagtcttaaagaccatcgagacgttgtcgttcttagctccgttacacaatccagcgaacattatgggtatcaagagcagcatgaaagtgttaccgggtgtgcctcaagttgccgtctttgatacagcgttccaccagaagatgccggagaaagcctatttgtacgcaatcccctatgagtactacgagaaatataaaattcgccgctatgggtttcatggaacctcacatcgtagggtgagtaaacgtgctgcggaaattatgggcaaaccgtacgatcagctcaagatcattaccgttcacgtgggtaacggcgcatcagttgcggcggtgaagaatggcgtatctgttgacacttccatgggtttcacaccacttgaaggtcttgtcatgggcacgcgcagcggcgatattgatccggccatcgtggaatttcttgagaaagaagaaggattgtcggccaaagaagtcgtcaacatcctcaacaagaaatctggtgtgtatgggctcaccaaaggctttagtagtgacatgcgtgacattgtgctgaaggctattgaaggtgatcctgtatgccgccttgcattagatgtgtattattatcgtatcgcgaaatatattggcgcatacgctgcggccatgaacggtgttgacgcgatcgtctttaccgcaggagttggcgaaaatagcccgattatgcgcgaagaaattattgagaactacttgggctacttagggatcaagatcgataaagaagccaatgacttcaaaggtgaggagaagatcatttcaacgcccgattccaaagtgattgcgatggtagttccgaccaacgaggagctcatgatcgccaaagacacgaaagaaatcattgagaaagggttggacgagcttaagatc

SEQ ID NO: 860 - protein, 417 aa, synthetic construct
  REGION 1..417: note = variant of acetate kinase from Marinitoga sp. 38H-ov
MHHHHHHGGSGMKVLVINSGSSSIKYQLLDMTNEKVLAKGLVERIGIDGSRIVHKVNGEGHVLEHEIKNHEIGLKLVLDLLTDEKYGVLKDLKEIDAVGHRVVHGGERFASSVKITDEVLKTIETLSFLAPLHNPANIMGIKSSMKVLPGVPQVAVFDTAFHQKMPEKAYLYAIPYEYYEKYKIRRYGFHGTSHRRVSKRAAEIMGKPYDQLKIITVHVGNGASVAAVKNGVSVDTSMGFTPLEGLVMGTRSGDIDPAIVEFLEKEEGLSAKEVVNILNKKSGVYGLTKGFSSDMRDIVLKAIEGDPVCRLALDVYYYRIAKYIGAYAAAMNGVDAIVFTAGVGENSPIMREEIIENYLGYLGIKIDKEANDFKGEEKIISTPDSKVIAMVVPTNEELMIAKDTKEIIEKGLDELKI

SEQ ID NO: 861 - DNA, 1251 bp, synthetic construct
  misc_feature 1..1251: note = variant of acetate kinase from Marinitoga sp. 38H-ov
  source 1..1251: mol_type = other DNA
atgcaccatcatcatcatcatggcggtagcggcatgaaagttctggtgattaattctggtagctcctccatcaaatatcagctcctcgatatgaccaacgaaaaggtattagcgaaaggcttggtcgagcgcattggcatcgacggttcgcgtatcgtgcataaagttaacggcgaagggcacgtgctggaacatgagattaaaaatcacgaaattggacttaaattggtcctggatcttcttacggacgaaaaatacggtgtgttgaaggatctcaaagaaatcgatgcagttgggcatcgcgtagtacatggcggcgagcgttttgccagtagcgtgaagattactgacgaagtcttaaagaccatcgagacgttgtcgttcttagctccgttacacaatccagcgaacattatgggtatcaagagcagcatgaaagtgttaccgggtgtgcctcaagttgccgtctttgatacagcgttccaccagaagatgccggagaaagcctatttgtacgcaatcccctatgagtactacgagaaatataaaattcgccgctatgggtttcatggaacctcacatcgttatgtgagtaaacgtgctgcggaaattatgggcaaaccgtacgatcagctcaagatcattaccgttcacgtgggtaacggcgcatcagttgcggcggtgaagaatggcgtatctgttgacacttccatgggtttcacaccacttgaaggtcttgtcatgggcacgcgcagcggcgatattgatccggccatcgtggaatttcttgagaaagaagaaggattgtcggccaaagaagtcgtcaacatcctcaacaagaaatctggtgtgtatgggctcaccaaaggctttagtagtgacatgcgtgacattttgctgaaggctattgaaggtgatcctgtatgccgccttgcattagatgtgtattattatcgtatcgcgaaatatattggcgcatacgctgcggccatgaacggtgttgacgcgatcgtctttaccgcaggagttggcgaaaatagcccgattatgcgcgaagaaattattgagaactacttgggctacttagggatcaagatcgataaagaagccaatgacttcaaaggtgaggagaagatcatttcaacgcccgattccaaagtgattgcgatggtagttccgaccaacgaggagctcatgatcgccaaagacacgaaagaaatcattgagaaagggttggacgagcttaagatc

SEQ ID NO: 862 - protein, 417 aa, synthetic construct
  REGION 1..417: note = variant of acetate kinase from Marinitoga sp. 38H-ov
MHHHHHHGGSGMKVLVINSGSSSIKYQLLDMTNEKVLAKGLVERIGIDGSRIVHKVNGEGHVLEHEIKNHEIGLKLVLDLLTDEKYGVLKDLKEIDAVGHRVVHGGERFASSVKITDEVLKTIETLSFLAPLHNPANIMGIKSSMKVLPGVPQVAVFDTAFHQKMPEKAYLYAIPYEYYEKYKIRRYGFHGTSHRYVSKRAAEIMGKPYDQLKIITVHVGNGASVAAVKNGVSVDTSMGFTPLEGLVMGTRSGDIDPAIVEFLEKEEGLSAKEVVNILNKKSGVYGLTKGFSSDMRDILLKAIEGDPVCRLALDVYYYRIAKYIGAYAAAMNGVDAIVFTAGVGENSPIMREEIIENYLGYLGIKIDKEANDFKGEEKIISTPDSKVIAMVVPTNEELMIAKDTKEIIEKGLDELKI

SEQ ID NO: 863 - DNA, 1251 bp, synthetic construct
  misc_feature 1..1251: note = variant of acetate kinase from Marinitoga sp. 38H-ov
  source 1..1251: mol_type = other DNA
atgcaccatcatcatcatcatggcggtagcggcatgaaagttctggtgattaattctggtagctcctccatcaaatatcagctcctcgatatgaccaacgaaaaggtattagcgaaaggcttggtcgagcgcattggcatcgacggttcgcgtatcgtgcataaagttaacggcgaagggcacgtgctggaacatgagattaaaaatcacgaaattggacttaaattggtcctggatcttcttacggacgaaaaatacggtgtgttgaaggatctcaaagaaatcgatgcagttgggcatcgcgtagtacatggcggcgagcgttttgccagtagcgtgaagattactgacgaagtcttaaagaccatcgagacgttgtcgttcttagctccgttacacaatccagcgaacattatgggtatcaagagcagcatgaaagtgttaccgggtgtgcctcaagttgccgtctttgatacagcgttccaccagaagatgccggagaaagcctatttgtacgcaatcccctatgagtactacgagaaatataaaattcgccgctatgggtttcatggaacctcacatcgttatgtgagtaaacgtgctgcggaaattatgggcaaaccgtacgatcagctcaagatcattaccgttcacgtgggtaacggcgcatcagttgcggcggtgaagaatggcgtatctgttgacacttccatgggtttcacaccacttgaaggtcttgtcatgggcacgcgcagcggcgatattgatccggccatcgtggaatttcttgagaaagaagaaggattgtcggccaaagaagtcgtcaacatcctcaacaagaaatctggtgtgtatgggctcaccaaaggctttagtagtgacatgcgtgacattgtgctgaaggctattgaaggtgatcctgtatgccgccttgcattagatgtgtattattatcgtatcgcgaaatatattggcgcatacgctgcggccatgaacggtgttgacgcgatcgtctttaccgcaggagttggcgaaaatagcccgtgtatgcgcgaagaaattattgagaactacttgggctacttagggatcaagatcgataaagaagccaatgacttcaaaggtgaggagaagatcatttcaacgcccgattccaaagtgattgcgatggtagttccgaccaacgaggagctcatgatcgccaaagacacgaaagaaatcattgagaaagggttggacgagcttaagatc

SEQ ID NO: 864 - protein, 417 aa, synthetic construct
  REGION 1..417: note = variant of acetate kinase from Marinitoga sp. 38H-ov
MHHHHHHGGSGMKVLVINSGSSSIKYQLLDMTNEKVLAKGLVERIGIDGSRIVHKVNGEGHVLEHEIKNHEIGLKLVLDLLTDEKYGVLKDLKEIDAVGHRVVHGGERFASSVKITDEVLKTIETLSFLAPLHNPANIMGIKSSMKVLPGVPQVAVFDTAFHQKMPEKAYLYAIPYEYYEKYKIRRYGFHGTSHRYVSKRAAEIMGKPYDQLKIITVHVGNGASVAAVKNGVSVDTSMGFTPLEGLVMGTRSGDIDPAIVEFLEKEEGLSAKEVVNILNKKSGVYGLTKGFSSDMRDIVLKAIEGDPVCRLALDVYYYRIAKYIGAYAAAMNGVDAIVFTAGVGENSPCMREEIIENYLGYLGIKIDKEANDFKGEEKIISTPDSKVIAMVVPTNEELMIAKDTKEIIEKGLDELKI

SEQ ID NO: 865 - DNA, 1251 bp, synthetic construct
  misc_feature 1..1251: note = variant of acetate kinase from Marinitoga sp. 38H-ov
  source 1..1251: mol_type = other DNA
atgcaccatcatcatcatcatggcggtagcggcatgaaagttctggtgattaattctggtagctcctccatcaaatatcagctcctcgatatgaccaacgaaaaggtattagcgaaaggcttggtcgagcgcattggcatcgacggttcgcgtatcgtgcataaagttaacggcgaagggcacgtgctggaacatgagattaaaaatcacgaaattggacttaaattggtcctggatcttcttacggacgaaaaatacggtgtgttgaaggatctcaaagaaatcgatgcagttgggcatcgcgtagtacatggcggcgagcgttttgccagtagcgtgaagattactgacgaagtcttaaagaccatcgagacgttgtcgttcttagctccgttacacaatccagcgaacattatgggtatcaagagcagcatgaaagtgttaccgggtgtgcctcaagttgccgtctttgatacagcgttccaccagaagatgccggagaaagcctatttgtacgcaatcccctatgagtactacgagaaatataaaattcgccgctatgggtttcatggaacctcacatcgttatgtgagtaaacgtgctgcggaaattatgggcaaaccgtacgatcagctcaagatcattaccgttcacgtgggtaacggcgcatcagttgcggcggtgaagaatggcgtatctgttgacacttccatgggtttcacaccacttgaaggtcttgtcatgggcacgcgcagcggcgatattgatccggccatcgtggaatttcttgagaaagaagaaggattgtcggccaaagaagtcgtcaacatcctcaacaagaaatctggtgtgtatgggctcaccaaaggctttagtagtgacatgcgtgacattgtgctgaaggctattgaaggtgatcctgtatgccgccttgcattagatgtgtatttttatcgtatcgcgaaatatattggcgcatacgctgcggccatgaacggtgttgacgcgatcgtctttaccgcaggagttggcgaaaatagcccgattatgcgcgaagaaattattgagaactacttgggctacttagggatcaagatcgataaagaagccaatgacttcaaaggtgaggagaagatcatttcaacgcccgattccaaagtgattgcgatggtagttccgaccaacgaggagctcatgatcgccaaagacacgaaagaaatcattgagaaagggttggacgagcttaagatc

SEQ ID NO: 866 - protein, 417 aa, synthetic construct
  REGION 1..417: note = variant of acetate kinase from Marinitoga sp. 38H-ov
MHHHHHHGGSGMKVLVINSGSSSIKYQLLDMTNEKVLAKGLVERIGIDGSRIVHKVNGEGHVLEHEIKNHEIGLKLVLDLLTDEKYGVLKDLKEIDAVGHRVVHGGERFASSVKITDEVLKTIETLSFLAPLHNPANIMGIKSSMKVLPGVPQVAVFDTAFHQKMPEKAYLYAIPYEYYEKYKIRRYGFHGTSHRYVSKRAAEIMGKPYDQLKIITVHVGNGASVAAVKNGVSVDTSMGFTPLEGLVMGTRSGDIDPAIVEFLEKEEGLSAKEVVNILNKKSGVYGLTKGFSSDMRDIVLKAIEGDPVCRLALDVYFYRIAKYIGAYAAAMNGVDAIVFTAGVGENSPIMREEIIENYLGYLGIKIDKEANDFKGEEKIISTPDSKVIAMVVPTNEELMIAKDTKEIIEKGLDELKI

SEQ ID NO: 867 - DNA, 1251 bp, synthetic construct
  misc_feature 1..1251: note = variant of acetate kinase from Marinitoga sp. 38H-ov
  source 1..1251: mol_type = other DNA
atgcaccatcatcatcatcatggcggtagcggcatgaaagttctggtgattaattctggtagctcctccatcaaatatcagctcctcgatatgaccaacgaaaaggtattagcgaaaggcttggtcgagcgcattggcatcgacggttcgcgtatcgtgcataaagttaacggcgaagggcacgtgctggaacatgagattaaaaatcacgaaattggacttaaattggtcctggatcttcttacggacgaaaaatacggtgtgttgaaggatctcaaagaaatcgatgcagttgggcatcgcgtagtacatggcggcgagcgttttgccagtagcgtgaagattactgacgaagtcttaaagaccatcgagacgttgtcgttcttagctccgttacacaatccagcgaacattatgggtatcaagagcagcatgaaagtgttaccgggtgtgcctcaagttgccgtctttgatacagcgttccaccagaagatgccggagaaagcctatttgtacgcaatcccctatgagtactacgagaaatataaaattcgccgctatgggtttcatggaacctcacatcgttatgtgagtaaacgtgctgcggaaattatgggcaaaccgtacgatcagctcaagatcattaccgttcacgtgggtaacggcgcatcagttgcggcggtgaagaatggcgtatctgttgacacttccatgggtttcacaccacttgaaggtcttgtcatgggcacgcgcagcggcgatattgatccggccatcgtggaatttcttgagaaagaagaaggattgtcggccaaagaagtcgtcaacatcctcaacaagaaatctggtgtgtatgggctcaccaaaggctttagtagtgacatgcgtgacattgtgctgaaggctattgaaggtgatcctgtaccgcgccttgcattagatgtgtattattatcgtatcgcgaaatatattggcgcatacgctgcggccatgaacggtgttgacgcgatcgtctttaccgcaggagttggcgaaaatagcccgattatgcgcgaagaaattattgagaactacttgggctacttagggatcaagatcgataaagaagccaatgacttcaaaggtgaggagaagatcatttcaacgcccgattccaaagtgattgcgatggtagttccgaccaacgaggagctcatgatcgccaaagacacgaaagaaatcattgagaaagggttggacgagcttaagatc

SEQ ID NO: 868 - protein, 417 aa, synthetic construct
  REGION 1..417: note = variant of acetate kinase from Marinitoga sp. 38H-ov
MHHHHHHGGSGMKVLVINSGSSSIKYQLLDMTNEKVLAKGLVERIGIDGSRIVHKVNGEGHVLEHEIKNHEIGLKLVLDLLTDEKYGVLKDLKEIDAVGHRVVHGGERFASSVKITDEVLKTIETLSFLAPLHNPANIMGIKSSMKVLPGVPQVAVFDTAFHQKMPEKAYLYAIPYEYYEKYKIRRYGFHGTSHRYVSKRAAEIMGKPYDQLKIITVHVGNGASVAAVKNGVSVDTSMGFTPLEGLVMGTRSGDIDPAIVEFLEKEEGLSAKEVVNILNKKSGVYGLTKGFSSDMRDIVLKAIEGDPVPRLALDVYYYRIAKYIGAYAAAMNGVDAIVFTAGVGENSPIMREEIIENYLGYLGIKIDKEANDFKGEEKIISTPDSKVIAMVVPTNEELMIAKDTKEIIEKGLDELKI

SEQ ID NO: 869 - DNA, 19 bp, synthetic construct
  misc_feature 1..19: note = Modified oligo substrate or product
  modified_base 16: mod_base = OTHER; note = 2'-methoxyguanosine
  modified_base 17: mod_base = OTHER; note = 2'-methoxyadenosine
  modified_base 18: mod_base = OTHER; note = 2'-methoxycytidine
  modified_base 19: mod_base = OTHER; note = 2'-methoxyuridine
  source 1..19: mol_type = other DNA
tttttttttttttttnnnn

SEQ ID NO: 870 - DNA, 19 bp, synthetic construct
  misc_feature 1..19: note = Modified oligo substrate or product
  modified_base 1: mod_base = OTHER; note = 2'-deoxythymidine with 6-carboxyfluorescein modification
  modified_base 16: mod_base = OTHER; note = 2'-methoxyguanosine
  modified_base 17: mod_base = OTHER; note = 2'-methoxyadenosine
  modified_base 18: mod_base = OTHER; note = 2'-methoxycytidine
  modified_base 19: mod_base = OTHER; note = 2'-methoxyuridine
  source 1..19: mol_type = other DNA
nttttttttttttttnnnn

SEQ ID NO: 871 - DNA, 19 bp, synthetic construct
  misc_feature 1..19: note = Modified oligo substrate or product
  modified_base 16: mod_base = OTHER; note = 2'-methoxyguanosine
  modified_base 17: mod_base = OTHER; note = 2'-methoxyadenosine
  modified_base 18: mod_base = OTHER; note = 2'-methoxycytidine
  modified_base 19: mod_base = OTHER; note = 2'-methoxyguanosine
  source 1..19: mol_type = other DNA
tttttttttttttttnnnn

SEQ ID NO: 872 - DNA, 19 bp, synthetic construct
  misc_feature 1..19: note = Modified oligo substrate or product
  modified_base 1: mod_base = OTHER; note = 2'-deoxythymidine with 6-carboxyfluorescein modification
  modified_base 16: mod_base = OTHER; note = 2'-methoxyguanosine
  modified_base 17: mod_base = OTHER; note = 2'-methoxyadenosine
  modified_base 18: mod_base = OTHER; note = 2'-methoxycytidine
  modified_base 19: mod_base = OTHER; note = 2'-methoxyguanosine
  source 1..19: mol_type = other DNA
nttttttttttttttnnnn

SEQ ID NO: 873 - DNA, 963 bp, synthetic construct
  misc_feature 1..963: note = variant of adenosine kinase from Xanthemonas campestris
  source 1..963: mol_type = other DNA
atgcatcatcaccatcaccatggggggtccggtatgagtgcactcatttgcggttctttagcgtatgataacatcatgtggtttccggactatttcaagaaccatattctgcccgatcgtgttcaccgcctcaatgtcagctttctggtatttgacatgcgtcgtgaatttggaggctgtgccggcaacattgcgtacaatctgcatctgttgggtggtcgcccgatcgtaatggctacggtgggccaagatttcggtccgtatcgcgaacacttcgaaactctgggcattgacttatcccgcgtcaagatcatcgatgatctgagtacaccgcaggggttcattaccaccgacatggatcaaaaccagattacggcgtttcacagcggcgcaatgatgcgttcgtacgaaaatcacgttcgtgatgtgccgggtgttaccttgggcctcgtaggtcctgatggacgcgagggcatgatccaaaatgccgaagaatttgctgctatgggcattccgttcatttttgacccaggtcaggcagtgcctctgttcagcggcccggaactgcgcgaatttatcgaacaggcggactatgtggtggtcaacgattacgaaagccgccttcttcaagcccgtactggctggaacgagcaggacattgttagccgcgtgcaggcgtatatcaccacgcaaggttcggctggagccgtggtaatgacaccggagaagcgctacgttattccggctgctaaaacttctcgtgtcgttgatccaactggttgcggcgacgcgtttcgcgccggcctgatctatggtattcagcatgaatatgattggttgaccattggccgcatgggaaacttaatgggtgcgctgaaagtggaacaccctggcacccaaaatcagcgtttcacctttgccgaattcaacgaccggttcaaacaatattttggctacgcgctc

SEQ ID NO: 874 - protein, 321 aa, synthetic construct
  REGION 1..321: note = variant of adenosine kinase from Xanthemonas campestris
MHHHHHHGGSGMSALICGSLAYDNIMWFPDYFKNHILPDRVHRLNVSFLVFDMRREFGGCAGNIAYNLHLLGGRPIVMATVGQDFGPYREHFETLGIDLSRVKIIDDLSTPQGFITTDMDQNQITAFHSGAMMRSYENHVRDVPGVTLGLVGPDGREGMIQNAEEFAAMGIPFIFDPGQAVPLFSGPELREFIEQADYVVVNDYESRLLQARTGWNEQDIVSRVQAYITTQGSAGAVVMTPEKRYVIPAAKTSRVVDPTGCGDAFRAGLIYGIQHEYDWLTIGRMGNLMGALKVEHPGTQNQRFTFAEFNDRFKQYFGYAL

SEQ ID NO: 875 - DNA, 693 bp, synthetic construct
  misc_feature 1..693: note = variant of adenylate kinase from Thermotoga neapolitana
  source 1..693: mol_type = other DNA
atgcaccatcatcaccatcacgggggctccggcatgggggcatatctggtgttattaggtccgccgggcgcgggaaaaggtacccaaggccgtattatttcggcaaagactggcatcccgcatattagcacgggcgatatcctgcgtcagatcgtcgctaagcaaaacgatgaagttgcctcgagcattaaagaatggatgctgaaaggtgaactcgttccagatgaaattggtaatcctgtagtaaaacgccgcctgaaggagaaagactgcgaaaaaggctttattttggatggtttcccgcgtaccgcccgtcaagcggaatatctggatagttttcttgaatcgcagggccgccagttgacagccgccgtgctgctggaggtccccgaagatgaagttgttgtgcgtctgctgtctcgccgtgtttgtccgaaatgcgggcgtagttacaacatgatttttctgccaccaaaagaagacgagctgtgtgacgattgcggtgtcagtttagtacagcgtttcgatgataaggaagaaacggtccgtatgcgcctgaaagtctaccgtgagaagacccagccggtcattgactattatagtaagaaaggtattctcgcacgcgtagatgggagccaagaaatcatgcctatcgtggcagaagtcctggggattctgggttggagcgataag

SEQ ID NO: 876 - protein, 231 aa, synthetic construct
  REGION 1..231: note = variant of adenylate kinase from Thermotoga neapolitana
MHHHHHHGGSGMGAYLVLLGPPGAGKGTQGRIISAKTGIPHISTGDILRQIVAKQNDEVASSIKEWMLKGELVPDEIGNPVVKRRLKEKDCEKGFILDGFPRTARQAEYLDSFLESQGRQLTAAVLLEVPEDEVVVRLLSRRVCPKCGRSYNMIFLPPKEDELCDDCGVSLVQRFDDKEETVRMRLKVYREKTQPVIDYYSKKGILARVDGSQEIMPIVAEVLGILGWSDK

SEQ ID NO: 877 - DNA, 1812 bp, synthetic construct
  misc_feature 1..1812: note = variant of pyruvate oxidase from Jeotgallibaca sp. 38H-ov
  source 1..1812: mol_type = other DNA
atgcaccatcatcatcatcatggcggtagcggcatgaccgatggcaagacgaaagttagcactgcgatgctgaaagtattagctggttgggacgtggataccatttatggaatcccgtctggtacactggcaccattgatggaagcccttggcgagcaggaagaaaccgacatcaaatttctgcaagtcaaacatgaggaagttggtgcgatggccgcagtaatgcagtggaaatacaagggcaaactcggagtttgcgtgggttcaggcggtccgggcgctactcacttagcgaacggcctgtatgatgccgccatggataatacccctgtcctggcaattctgggaagtcgcccgcagcgtgaactgaacatggatgccttccaagagttgaatcagaaccccatgtttgcgaatattgcggtgtacaaccgccgcgtggcctatgcagaacagaccccgaaactcgtcgacgaagctatccgtacggccatttcgaaacgtggtgttgcggtgctggaagttccaggcgatttcggctttcatgagatcgcaaatgacgctttctatagcagcggtcactcctacaaagattatgttagttcggcgattaacgaagccgatatcgacgctgcggtcgaagtgctgaacaacagcgatcgcaccgtaatttacgcaggcatcggtacaatgggccatggtccggcggttcaagaactttctcgcaagattaaagcgcctatcattaccacgggcaagaattttgagacctttgaatgggacttcgaggccctgactggttcaacgtatcgtgtgggttggaaaccggcaaatgaagccgtcaaagaagctgataccgtgttgtttgttggcagcaacttcccgtttgcggagattgaaggtaccttctcaaatatcaagaaatttattcagatcgataacaatccccgcatgttaggaaaacgccacaatcctgacgtagcgattttaggcgatgccggtgaagcggtgcatagtctccttgagaaagtcactccagtggaagaatctgcctggtggaacgcgaacgtcaagaatgttcagaactggcgtgactacatgaacaaattggagcagaaagaaagcggcgatctgcaactgtatcaggtgtacaatgccatcaacaaatatgcagatgaagacgctatttattcgacggatgtaggcaattccacccaaaccagcattcgccatcttcacatgacgccgaagaatatgtggcgtacctcgccgttatttgcgacgatgggtatcgccttacctggcggcattgcagcgaagaacgtttacccagatcgccaggcttggaacttgatgggtgatggagcgttcaatatggtgtatccggacgtcgtaactaacgtgtggtacaatatgccggttatcaacgtggtgtttaccaacacagagtacggtttcattaagaacaaatatgaagataccaataagaacacgtttggcaccgaattcccggacgtcgattatgcaatgatcgctcaagcacagggcgctgtgggatttacggtctcacgcattgaagacatcgatcaggtaatggccgatgcggtgaaagcgtacaaagagggtaaaaccgtggttattgacgccaagatcaccaaagatcgtcccattccggtagaaacactcaaattagacccgcgcctttatagtgccgaagagatcaaagcgtacaaagagaaatatgaagctgaagaactcgttccattctccgagttcttgaaagcagaaggccttacgagcaaagtgtctaag

SEQ ID NO: 878 - protein, 604 aa, synthetic construct
  REGION 1..604: note = variant of pyruvate oxidase from Jeotgallibaca sp. 38H-ov
MHHHHHHGGSGMTDGKTKVSTAMLKVLAGWDVDTIYGIPSGTLAPLMEALGEQEETDIKFLQVKHEEVGAMAAVMQWKYKGKLGVCVGSGGPGATHLANGLYDAAMDNTPVLAILGSRPQRELNMDAFQELNQNPMFANIAVYNRRVAYAEQTPKLVDEAIRTAISKRGVAVLEVPGDFGFHEIANDAFYSSGHSYKDYVSSAINEADIDAAVEVLNNSDRTVIYAGIGTMGHGPAVQELSRKIKAPIITTGKNFETFEWDFEALTGSTYRVGWKPANEAVKEADTVLFVGSNFPFAEIEGTFSNIKKFIQIDNNPRMLGKRHNPDVAILGDAGEAVHSLLEKVTPVEESAWWNANVKNVQNWRDYMNKLEQKESGDLQLYQVYNAINKYADEDAIYSTDVGNSTQTSIRHLHMTPKNMWRTSPLFATMGIALPGGIAAKNVYPDRQAWNLMGDGAFNMVYPDVVTNVWYNMPVINVVFTNTEYGFIKNKYEDTNKNTFGTEFPDVDYAMIAQAQGAVGFTVSRIEDIDQVMADAVKAYKEGKTVVIDAKITKDRPIPVETLKLDPRLYSAEEIKAYKEKYEAEELVPFSEFLKAEGLTSKVSK

SEQ ID NO: 879 - DNA, 1812 bp, synthetic construct
  misc_feature 1..1812: note = variant of pyruvate oxidase from Jeotgallibaca sp. 38H-ov
  source 1..1812: mol_type = other DNA
atgcaccatcatcatcatcatggcggtagcggcatgaccgatggcaagacgaaagttagcactgcgatgctgaaagtattagctggttgggacgtggataccatttatggaatcccgtctggtacactggcaccattgatggaagcccttggcgagcaggaagaaaccgacatcaaatttctgcaagtcaaacatgaggaagttggtgcgatggccgcagtaatgcagtggaaatacaagggcaaactcggagtttgcgtgggttcaggcggtccgggcgctactcacttagcgaacggcctgtatgatgccgccatggataatacccctgtcctggcaattctgggatcgcgcccgcagcgtgaactgaacatggatgccttccaagagttgaatcaggtccccatgtttgcgaacattgcggtgtacaaccgccgcgtggcctatgcagaacagaccccgaaactcgtcgacgaagctatccgtacggccatttcgaaacgtggtgttgcggtgctggaagttccaggcgatttcggctttcatgagatcgcaaatgacgctttctatagcagcggtcactcctacaaagattatgttagttcggcgattaacgaagccgatatcgacgctgcggtcgaagtgctgaacaacagcgatcgcaccgtaatttacgcaggcatcggtacaatgggccatggtccggcggttcaagaactttctcgcaagattaaagcgcctatcattaccacgggcaagaattttgagacctttgaatgggacttcgaggccctgactggttcaacgtatcgtgtgggttggaaaccggcaaatgaagccgtcaaagaagctgataccgtgttgtttgttggcagcaacttcccgtttgcggagattgaaggtaccttctcaaatatcaagaaatttattcagatcgataacaatccccgcatgttaggaaaacgccacaatcctgacgtagcgattttagccgatgccggtgaagcggtgcatagtctccttgagaaagtcactccagtggaagaatctgcctggtggaacgcgaacgtcaagaatgttcagaactggcgtgactacatgaacaaattggagcagaaagaaagcggcgatctgcaactgtatcaggtgtacaatgccatcaacaaatatgcagatgaagacgctatttattcgacggatgtaggcaattccacccaaaccagcattcgccatcttcacatgacgccgaagaatatgtggcgtacctcgccgttatttgcgacgatgggtatcgccttacctggcggcattgcagcgaagaacgtttacccagatcgccaggcttggaacttgatgggtgatggagcgttcaatatggtgtatccggacgtcgtaactaacgtgtggtacaatatgccggttatcaacgtggtgtttaccaacacagagtacggtttcattaagaacaaatatgaagataccaataagaacacgtttggcaccgaattcccggacgtcgattatgcaatgatcgctcaagcacagggcgctgtgggatttacggtctcacgcattgaagacatcgatcaggtaatggccgatgcggtgaaagcgtacaaagagggtaaaaccgtggttattgacgccaagatcaccaaagatcgtcccattccggtagaaacactcaaattagacccgcgcctttatagtgccgaagagatcaaagcgtacaaagagaaatatgaagctgaagaactcgttccattctccgagttcttgaaagcagaaggccttacgagcaaagtgtctaag

SEQ ID NO: 880 - protein, 604 aa, synthetic construct
  REGION 1..604: note = variant of pyruvate oxidase from Jeotgallibaca sp. 38H-ov
MHHHHHHGGSGMTDGKTKVSTAMLKVLAGWDVDTIYGIPSGTLAPLMEALGEQEETDIKFLQVKHEEVGAMAAVMQWKYKGKLGVCVGSGGPGATHLANGLYDAAMDNTPVLAILGSRPQRELNMDAFQELNQVPMFANIAVYNRRVAYAEQTPKLVDEAIRTAISKRGVAVLEVPGDFGFHEIANDAFYSSGHSYKDYVSSAINEADIDAAVEVLNNSDRTVIYAGIGTMGHGPAVQELSRKIKAPIITTGKNFETFEWDFEALTGSTYRVGWKPANEAVKEADTVLFVGSNFPFAEIEGTFSNIKKFIQIDNNPRMLGKRHNPDVAILADAGEAVHSLLEKVTPVEESAWWNANVKNVQNWRDYMNKLEQKESGDLQLYQVYNAINKYADEDAIYSTDVGNSTQTSIRHLHMTPKNMWRTSPLFATMGIALPGGIAAKNVYPDRQAWNLMGDGAFNMVYPDVVTNVWYNMPVINVVFTNTEYGFIKNKYEDTNKNTFGTEFPDVDYAMIAQAQGAVGFTVSRIEDIDQVMADAVKAYKEGKTVVIDAKITKDRPIPVETLKLDPRLYSAEEIKAYKEKYEAEELVPFSEFLKAEGLTSKVSK

SEQ ID NO: 881 - DNA, 1812 bp, synthetic construct
  misc_feature 1..1812: note = variant of pyruvate oxidase from Jeotgallibaca sp. 38H-ov
  source 1..1812: mol_type = other DNA
atgcaccatcatcatcatcatggcggtagcggcatgaccgatagcaagacgaaagttagcactgcgatgctgaaagtattagctggttgggacgtggataccatttatggaatcccgtctggtacactggcaccattgatggaagcccttggcgagcaggaagaaaccgacatcaaatttctgcaagtcaaacatgaggaagttggtgcgatggccgcagtaatgcagtggaaatacaagggcaaactcggagtttgcgtgggttcaggcggtccgggcgctactcacttagcgaacggcctgtatgatgccgccatggataatacccctgtcctggcaattctgggatcgcgcccgcagcgtgaactgaacatggatgccttccaagagttgaatcaggtccccatgtttgcgaacattgcggtgtacaaccgccgcgtggcctatgcagaacagaccccgaaactcgtcgacgaagctatccgtacggccatttcgaaacgtggtgttgcggtgctggaagttccaggcgatttcggctttcatgaaatcgcaaatgacgctttctatagcagcggtcactcctacaaagattatgttagttcggcgattaacgaagccgatatcgacgctgcggtcgaagtgctgaacaacagcgatcgcaccgtaatttacgcaggcatcggtacaatgggccatggtccggcggttcaagaactttctcgcaagattaaagcgcctatcattaccacgggcaagaattttgagacctttgaatgggacttcgaggccctgactggttcaacgtatcgtgtgggttggaaaccggcaaatgaagccgtcaaagaagctgataccgtgttgtttgttggcagcaacttcccgtttgcggagattgaaggtaccttctcaaatatcaagaaatttattcagatcgataacaatccccgcatgttaggaaaacgccacaatcctgacgtagcgattttagccgatgccggtgaagcggtgcatagtctccttgagaaagtcactccagtggaagaatctgcctggtggaacgcgaacgtcaagaatgttcagaactggcgtgactacatgaacaaattggagcagaaagaaagcggcgatctgcaactgtatcaggtgtacaatgccatcaacaaatatgcagatgaagacgctatttattcgacggatgtaggcaattccacccaaaccagcattcgccatcttcacatgacgccgaagaatatgtggcgtacctcgccgttatttgcgacgatgggtatcgccttacctggcggcattgcagcgaagaacgtttacccagatcgccaggcttggaacttgatgggtgatggagcgttcaatatggtgtatccggacgtcgtaactaacgtgtggtacaatatgccggttatcaacgtggtgtttaccaacacagagtacggtttcattaagaacaaatatgaagataccaataagaacacgtttggcaccgaattcccggacgtcgattatgcaatgatcgctcaagcacagggcgctgtgggatttacggtctcacgcattgaagacatcgatcaggtaatggccgatgcggtgaaagcgtacaaagagggtaaaaccgtggttattgacgccaagatcaccaaagatcgtcccattccggtagaaacactcaaattagacccgcgcctttatagtgccgaagagatcaaagcgtacaaagagaaatatgaagctgaagaactcgttccattctccgagttcttgaaagcagaaggccttacgagcaaagtgtctaag

SEQ ID NO: 882 - protein, 604 aa, synthetic construct
  REGION 1..604: note = variant of pyruvate oxidase from Jeotgallibaca sp. 38H-ov
MHHHHHHGGSGMTDSKTKVSTAMLKVLAGWDVDTIYGIPSGTLAPLMEALGEQEETDIKFLQVKHEEVGAMAAVMQWKYKGKLGVCVGSGGPGATHLANGLYDAAMDNTPVLAILGSRPQRELNMDAFQELNQVPMFANIAVYNRRVAYAEQTPKLVDEAIRTAISKRGVAVLEVPGDFGFHEIANDAFYSSGHSYKDYVSSAINEADIDAAVEVLNNSDRTVIYAGIGTMGHGPAVQELSRKIKAPIITTGKNFETFEWDFEALTGSTYRVGWKPANEAVKEADTVLFVGSNFPFAEIEGTFSNIKKFIQIDNNPRMLGKRHNPDVAILADAGEAVHSLLEKVTPVEESAWWNANVKNVQNWRDYMNKLEQKESGDLQLYQVYNAINKYADEDAIYSTDVGNSTQTSIRHLHMTPKNMWRTSPLFATMGIALPGGIAAKNVYPDRQAWNLMGDGAFNMVYPDVVTNVWYNMPVINVVFTNTEYGFIKNKYEDTNKNTFGTEFPDVDYAMIAQAQGAVGFTVSRIEDIDQVMADAVKAYKEGKTVVIDAKITKDRPIPVETLKLDPRLYSAEEIKAYKEKYEAEELVPFSEFLKAEGLTSKVSK

SEQ ID NO: 883 - DNA, 1587 bp, synthetic construct
  misc_feature 1..1587: note = variant of terminal nucleotidyl transferase from Monodelphis domestica
  source 1..1587: mol_type = other DNA
atgcaccatcatcatcatcatggcggtagcggcagccacggcattcgtaccatcgattcggacttcgggaagaaacagcagaaaaaaggcgataaccacgatagttccgccacttatgaaatcaaatttcacgagtttgtgctgttcattctcgaagaaaaaatgggtgcgacgcgtcacacttttctgacagatttagcccgcaagaaagggttccgcgtcgagaatgaactgaccgacgaagttacccacatcgtggcagaaaatctgtcacgctctgaagtattggcttggctgaaagaacacaagatggagaagaccaagcaattcgaactgctggatattagctggcttatcgaaagcatgaaagttggtaaaccggtggacaccaaggggaaataccagttggcggaatcggttgaggtgagtgcgaacccagatccgacagaaggtcgtgtaaacgagctgcctcctactatgaaaaccgtttctccgtatgcgtgtcagcgccgcaccaccgtcaacaaccgcaatcaacgttttacggactcgctggagattcttcgcaccttctacaccttaaaaggcatggatgataaggcgctgatgtttcgtcgtgctcagtccgtgctgaaaagccttccgtttgaggtacgtagcctggctgacacggaaggattgccctggatcagtgatgaagtcaaagggattatggaagaaatcatcgaagtcggggagtcgcgtgaagtgcaggccgtgctcaatgatgagtggtatcgtgtgatgagcctgtttacgtcggtctttggagtggggcgtcctacagcatcgaagtggtaccaaatgggtctgcgcaccctggaggatgttcgttccagcaaggacgtgagtttgtcgacgtgggcaaaagtaggtctgacgcattatgaagatcttcgccgcggcgttacccgtgtggaagctgacgcgatttggctgctggttctggatgcagtcgcaactttcgacccggatgtgattgtggaactggtcggtggacagcgtcgtgggaaaccgctgtctcacgacgttgatctgcttgttagtccgccgggagctgaaagtgagcaagaagaccaactcctgcagaaagtgctgcgctactggaagaaacaagggctgttgctgtgcggtaaagtgtattggagtaagtgggaatgggggtcgctgtcgcagggtccggtggatgaaggggacggcgaggcagcgtgctttctggttctcaaactttatgatcatctggtgcgcaaaagtaaacataatatgccgactggttcgaacatgggcgaaggcaaaccgtggaaagcaattcgcgtagatctgctgcgttgcccccgcggcagtcttgcgtttggcatgttgcagtggaccggaagccgcatgttccgtcaggatctgcgtgattacgcccgcatcgagaagaacatggtgctgcacaatcatggtctgtatgacatgactcgcggtatccaactccctgctaaatcggaagaggaaattttcgaacatctggggcttgaatacctggaaccggtttatcgtaacgca

SEQ ID NO: 884 - protein, 529 aa, synthetic construct
  REGION 1..529: note = variant of terminal nucleotidyl transferase from Monodelphis domestica
MHHHHHHGGSGSHGIRTIDSDFGKKQQKKGDNHDSSATYEIKFHEFVLFILEEKMGATRHTFLTDLARKKGFRVENELTDEVTHIVAENLSRSEVLAWLKEHKMEKTKQFELLDISWLIESMKVGKPVDTKGKYQLAESVEVSANPDPTEGRVNELPPTMKTVSPYACQRRTTVNNRNQRFTDSLEILRTFYTLKGMDDKALMFRRAQSVLKSLPFEVRSLADTEGLPWISDEVKGIMEEIIEVGESREVQAVLNDEWYRVMSLFTSVFGVGRPTASKWYQMGLRTLEDVRSSKDVSLSTWAKVGLTHYEDLRRGVTRVEADAIWLLVLDAVATFDPDVIVELVGGQRRGKPLSHDVDLLVSPPGAESEQEDQLLQKVLRYWKKQGLLLCGKVYWSKWEWGSLSQGPVDEGDGEAACFLVLKLYDHLVRKSKHNMPTGSNMGEGKPWKAIRVDLLRCPRGSLAFGMLQWTGSRMFRQDLRDYARIEKNMVLHNHGLYDMTRGIQLPAKSEEEIFEHLGLEYLEPVYRNA

SEQ ID NO: 885 - DNA, 630 bp, synthetic construct
  misc_feature 1..630: note = variant of adenylyl sulfate kinase from Thermotoga sp. RQ7
  source 1..630: mol_type = other DNA
atgaatccgaaagcgaagaacattgtttggcatgaaggcaaagtcaagaaagaggatcgcgaaaaactgctgggtcagaaaggcgtagtggtgtggctcaccggtttaagcggcgcagggaaatctacgatcgcccacgaattggaatggcgtctgcttgagatgggaaaactggcttatgttttggacggtgataacattcgccatggcctgaatagtgatctggggttttcgcctgaagaccgtaaagaaaacatccgccgcatttccgaagtggcgaagttattcgccgatgcgggtctgatcactattaccgcatttatctcaccataccgtgaggaccgtaaacgcgctcgtaatctccttaaagaaggcgagttcattgaagtctatgtaaaatgcccgctggatgtgctgatcgaacgtgatccgaagggtctgtacaagaaagccttagcgggcgagattaaagagtttacaggaattagcgcaccctatgaagaaccggaagacccagaactggttgttgagaccgataaagaaagcatcgaagaatcggtgaacaagatcttgaattacctgcgcgagaaaggcattatcggtggctccggccaccatcatcaccatcac

SEQ ID NO: 886 - protein, 210 aa, synthetic construct
  REGION 1..210: note = variant of adenylyl sulfate kinase from Thermotoga sp. RQ7
MNPKAKNIVWHEGKVKKEDREKLLGQKGVVVWLTGLSGAGKSTIAHELEWRLLEMGKLAYVLDGDNIRHGLNSDLGFSPEDRKENIRRISEVAKLFADAGLITITAFISPYREDRKRARNLLKEGEFIEVYVKCPLDVLIERDPKGLYKKALAGEIKEFTGISAPYEEPEDPELVVETDKESIEESVNKILNYLREKGIIGGSGHHHHHH

SEQ ID NO: 887 - DNA, 630 bp, synthetic construct
  misc_feature 1..630: note = variant of adenylyl sulfate kinase from Thermotoga sp. RQ7
  source 1..630: mol_type = other DNA
atgaatccgaaagcgaagaacattgtttggcatgaaggcaaagtcaagaaagaggatcgcgaaaaactgctgggtcagaaaggcgtagtggtgtggctcaccggtttaagcggcgcagggaaatctacgatcgcccacgaattggaatggcgtctgcttgagatgggaaaactggcttatgttttggacggtgataacattcgccatggcctgaatagtgatctggggttttcgcctgaagaccgtaaagaatcgatccgccgcatttccgaagtggcgaagttattcgccgatgcgggtctgatcactattaccgcatttatctcaccataccgtgaggaccgtaaacgcgctcgtaatctccttaaagaaggcgagttcattgaagtctatgtaaaatgcccgctggatgtgctgatcgaacgtgatccgaagggtctgtacaagaaagccttagcgggcgagattaaagagtttacaggaattagcgcaccctatgaagaaccggaagacccagaactggttgttgagaccgataaagaaagcatcgaagaatcggtgaacaagatcttgaattacctgcgcgagaaaggcattatcggtggctccggccaccatcatcaccatcac

SEQ ID NO: 888 - protein, 210 aa, synthetic construct
  REGION 1..210: note = variant of adenylyl sulfate kinase from Thermotoga sp. RQ7
MNPKAKNIVWHEGKVKKEDREKLLGQKGVVVWLTGLSGAGKSTIAHELEWRLLEMGKLAYVLDGDNIRHGLNSDLGFSPEDRKESIRRISEVAKLFADAGLITITAFISPYREDRKRARNLLKEGEFIEVYVKCPLDVLIERDPKGLYKKALAGEIKEFTGISAPYEEPEDPELVVETDKESIEESVNKILNYLREKGIIGGSGHHHHHH

SEQ ID NO: 889 - DNA, 630 bp, synthetic construct
  misc_feature 1..630: note = variant of adenylyl sulfate kinase from Thermotoga sp. RQ7
  source 1..630: mol_type = other DNA
atgaatccgaaagcgaagaacattgtttggcaggaaggcaaagtcaagaaagaggatcgcgaaaaactgctgggtcagaaaggcgtagtggtgtggctcaccggtttaagcggcgcagggaaatctacgatcgcccacgaattggaatggcgtctgcttgagatgggaaaactggcttatgttttggacggtgataacattcgccatggcctgaatagtgatctgtggtttgcgcctgaagaccgtaaagaatcgatccgccgcatttccgaagtggcgaagttattcgccgatgcgggtctgatcactattaccgcatttatcggcccataccgtgaggaccgtaaacgcgctcgtaatctccttaaagaaggcgagttcattgaagtctatgtaaaatgcccgctggatgtgctgatcgaacgtgatccgaagggtctgtacaagaaagccttagcgggcgagattaaagaatttacaggaattagcgcaccctatgaagaaccggaagacccagaactggttggcgagaccgataaagaaagcatcgaagaatcggtgaacaagatcttgaattacctgcgcgagaaaggcattatcggtggctccggccaccatcatcaccatcac

SEQ ID NO: 890 - protein, 210 aa, synthetic construct
  REGION 1..210: note = variant of adenylyl sulfate kinase from Thermotoga sp. RQ7
MNPKAKNIVWQEGKVKKEDREKLLGQKGVVVWLTGLSGAGKSTIAHELEWRLLEMGKLAYVLDGDNIRHGLNSDLWFAPEDRKESIRRISEVAKLFADAGLITITAFIGPYREDRKRARNLLKEGEFIEVYVKCPLDVLIERDPKGLYKKALAGEIKEFTGISAPYEEPEDPELVGETDKESIEESVNKILNYLREKGIIGGSGHHHHHH

SEQ ID NO: 891 - DNA, 630 bp, synthetic construct
  misc_feature 1..630: note = variant of adenylyl sulfate kinase from Thermotoga sp. RQ7
  source 1..630: mol_type = other DNA
atgaatccgaaagcgaagaacattgtttggcaggaaggcaaagtcaagaaagaggatcgcgaaaaactgctgggtcagaaaggcgtagtggtgtggctcaccggtttaagcggcgcagggaaatctacgatcgcccacgaattggaatggcgtctgcttgagatgggaaaactggcttatgttttggacggtgataacattcgccatggcctgaatagtgatctgtggtttgcgcctgaagaccgtaaagaatcgatccgccgcatttccgaagtggcgaagttattcgccgatgcgggtctgatcactattaccgcatttatcggcccataccgtgaggaccgtaaacgcgctcgtaatctccttaaagaaggcgagttcattgaagtctatgtaaaatgcccgctggatgtgctgatcgaacgtgatccgaagggtctgtacaagaaagccttagcgggcgagattaaagaatttacaggaattagcgcaccctatgaagaaccggaagacccagaactggttgtggagaccgataaagaaagcatcgaagaatcggtgaacaagatcttgaattacctgcgcgagaaaggcattatcggtggctccggccaccatcatcaccatcac

SEQ ID NO: 892 - protein, 210 aa, synthetic construct
  REGION 1..210: note = variant of adenylyl sulfate kinase from Thermotoga sp. RQ7
MNPKAKNIVWQEGKVKKEDREKLLGQKGVVVWLTGLSGAGKSTIAHELEWRLLEMGKLAYVLDGDNIRHGLNSDLWFAPEDRKESIRRISEVAKLFADAGLITITAFIGPYREDRKRARNLLKEGEFIEVYVKCPLDVLIERDPKGLYKKALAGEIKEFTGISAPYEEPEDPELVVETDKESIEESVNKILNYLREKGIIGGSGHHHHHH

SEQ ID NO: 893 - DNA, 1251 bp, synthetic construct
  misc_feature 1..1251: note = variant of acetate kinase from Marinitoga sp.38H-ov
  source 1..1251: mol_type = other DNA
atgcaccatcatcatcatcatggcggtagcggcatgaaagttctggtgattaattctggtagctcctccatcaaatatcagctcctcgatatgaccaacgaaaaggtattagcgaaaggcttggtcgagcgcattggcatcgacggttcgcgtatcgtgcataaagttaacggcgaagggcacgtgctggaacatgagattaaaaatcacgaaattggacttaaattggtcctggatcttcttacggacgaaaaatacggtgtgttgaaggatctcaaagaaatcgatgcagttgggcatcgcgtagtacatggcggcgagcgttttgccagtagcgtgaagattactgacgaagtcttaaagaccatcgagacgttgtcgttcttagctccgttacacaatccagcgaacattatgggtatcaagagcagcatgaaagtgttaccgggtgtgcctcaagttgccgtctttgatacagcgttccaccagaagatgccggagaaagcctatttgtacgcaatcccctatgagtactacgagaaatataaaattcgccgctatgggtttcatggaacctcacatcgttatgtgagtaaacgtgctgcggaaattatgggcaaaccgtacgatcagctcaagatcattaccgttcacgtgggtaacggcgcatcagttgcggcggtgaagaatggcgtatctgttgacacttccatgggtttcacaccacttgaaggtcttgtcatgggcacggatagcggcgatattgatccggccatcgtggaatttcttgagaaagaagaaggattgtcggccaaagaagtcgtcaacatcctcaacaagaaatctggtgtgtatgggctcaccaaaggctttagtagtgacatgcgtgacattgtgctgaaggctattgaaggtgatcctgtatgccgccttgcattagatgtgtattattatcgtatcgcgaaatatattggcgcatacgctgcggccatgaacggtgttgacgcgatcgtctttaccgcaggagttggcgaaaatagcccgattatgcgcgaagaaattattgagaactacttgggctacttagggatcaagatcgataaagaagccaatgacttcaaaggtgaggagaagatcatttcaacgcccgattccaaagtgattgcgatggtagttccgaccaacgaggagctcatgatcgccaaagacacgaaagaaatcattgagaaagggttggacgagcttaagatc

SEQ ID NO: 894 - protein, 417 aa, synthetic construct
  REGION 1..417: note = variant of acetate kinase from Marinitoga sp.38H-ov
MHHHHHHGGSGMKVLVINSGSSSIKYQLLDMTNEKVLAKGLVERIGIDGSRIVHKVNGEGHVLEHEIKNHEIGLKLVLDLLTDEKYGVLKDLKEIDAVGHRVVHGGERFASSVKITDEVLKTIETLSFLAPLHNPANIMGIKSSMKVLPGVPQVAVFDTAFHQKMPEKAYLYAIPYEYYEKYKIRRYGFHGTSHRYVSKRAAEIMGKPYDQLKIITVHVGNGASVAAVKNGVSVDTSMGFTPLEGLVMGTDSGDIDPAIVEFLEKEEGLSAKEVVNILNKKSGVYGLTKGFSSDMRDIVLKAIEGDPVCRLALDVYYYRIAKYIGAYAAAMNGVDAIVFTAGVGENSPIMREEIIENYLGYLGIKIDKEANDFKGEEKIISTPDSKVIAMVVPTNEELMIAKDTKEIIEKGLDELKI

SEQ ID NO: 895 - DNA, 1251 bp, synthetic construct
  misc_feature 1..1251: note = variant of acetate kinase from Marinitoga sp.38H-ov
  source 1..1251: mol_type = other DNA
atgcaccatcatcatcatcatggcggtagcggcatgaaagttctggtgattaattctggtagctcctccatcaaatatcagctcctcgatatgaccaacgaaaaggtattagcgaaaggcttggtcgagcgcattggcatcgacggttcgcgtatcgtgcataaagttaacggcgaagggcacgtgctggaacatgagattaaaaatcacgaaattggacttaaattggtcctggatcttcttacggacgaaaaatacggtgtgttgaaggatctcaaagaaatcgatgcagttgggcatcgcgtagtacatggcggcgagcgttttgccagtagcgtgaagattactgacgaagtcttaaagaccatcgagacgttgtcgttcttagctccgttacacaatccagcgaacattatgggtatcaagagcagcatgaaagtgttaccgggtgtgcctcaagttgccgtctttgatacagcgttccaccagaagatgccggagaaagcctatttgtacgcaatcccctatgagtactacgagaaatataaaattcgccgctatgggtttcatggaacctcacatcgttatgtgagtaaacgtgctgcggaaattatgggcaaaccgtacgatcagctcaagatcattaccgttcacgtgggtaacggcgcatcagttgcggcggtgaagaatggcgtatctgttgacacttccatgggtttcacagttcttgaaggtcttgtcatgggcacgcgcagcggcgatattgatccggccatcgtggaatttcttgagaaagaagaaggattgtcggccaaagaagtcgtcaacatcctcaacaagaaatctggtgtgtatgggctcaccaaaggctttagtagtgacatgcgtgacattgtgctgaaggctattgaaggtgatcctgtatgccgccttgcattagatgtgtattattatcgtatcgcgaaatatattggcgcatacgctgcggccatgaacggtgttgacgcgatcgtctttaccgcaggagttggcgaaaatagcccgattatgcgcgaagaaattattgagaactacttgggctacttagggatcaagatcgataaagaagccaatgacttcaaaggtgaggagaagatcatttcaacgcccgattccaaagtgattgcgatggtagttccgaccaacgaggagctcatgatcgccaaagacacgaaagaaatcattgagaaagggttggacgagcttaagatc

SEQ ID NO: 896 - protein, 417 aa, synthetic construct
  REGION 1..417: note = variant of acetate kinase from Marinitoga sp.38H-ov
MHHHHHHGGSGMKVLVINSGSSSIKYQLLDMTNEKVLAKGLVERIGIDGSRIVHKVNGEGHVLEHEIKNHEIGLKLVLDLLTDEKYGVLKDLKEIDAVGHRVVHGGERFASSVKITDEVLKTIETLSFLAPLHNPANIMGIKSSMKVLPGVPQVAVFDTAFHQKMPEKAYLYAIPYEYYEKYKIRRYGFHGTSHRYVSKRAAEIMGKPYDQLKIITVHVGNGASVAAVKNGVSVDTSMGFTVLEGLVMGTRSGDIDPAIVEFLEKEEGLSAKEVVNILNKKSGVYGLTKGFSSDMRDIVLKAIEGDPVCRLALDVYYYRIAKYIGAYAAAMNGVDAIVFTAGVGENSPIMREEIIENYLGYLGIKIDKEANDFKGEEKIISTPDSKVIAMVVPTNEELMIAKDTKEIIEKGLDELKI

SEQ ID NO: 897 - DNA, 1251 bp, synthetic construct
  misc_feature 1..1251: note = variant of acetate kinase from Marinitoga sp.38H-ov
  source 1..1251: mol_type = other DNA
atgcaccatcatcatcatcatggcggtagcggcatgaaagttctggtgattaattctggtagctcctccatcaaatatcagctcctcgatatgaccaacgaaaaggtattagcgaaaggcttggtcgagcgcattggcatcgacggttcgcgtatcgtgcataaagttaacggcgaagggcacgtgctggaacatgagattaaaaatcacgaaattggacttaaattggtcctggatcttcttacggacgaaaaatacggtgtgttgaaggatctcaaagaaatcgatgcagttgggcatcgcgtagtacatggcggcgagcgttttgccagtagcgtgaagattactgacgaagtcttaaagaccatcgagacgttgtcgttcttagctccgttacacaatccagcgaacattatgggtatcaagagcagcatgaaagtgttaccgggtgtgcctcaagttgccgtctttgatacagcgttccaccagaagatgccggagaaagcctatttgtacgcaatcccctatgagtactacgagaaatataaaattcgccgctatgggtttcatggaacctcacatcgttatgtgagtaaacgtgctgcggaaattatgggcaaaccgtacgatcagctcaagatcattaccgttcacgtgggtaacggcgcatcagttgcggcggtgaagaatggcgtatctgttgacacttccatgggtttcacaccacttgaaggtcttgtcatgggcacgcgcagcggcgatattgatccggccatcgtggaatttcttgagaaagaagaaggattgtcggccaaagaagtcgtcaacatcctcaacaagaaatctggtgtgtatgggctcaccaaaggctttagtagtgacatgcgtgacattgtgctgaaggctattgaaggtgatcctgtatgccgccttgcattagatgtgtattattatcgtatcgcgaaatatattggcgcatacgctgcggccatgaacggtgttgacgcgatcgtctttaccgcaggagttggcgaaaatagcccgattatgcgcgaagaaattattgagaactacttgggctacttagggatcaagatcgataaagaagccaatgacttcaaaggtgaggagaagatcatttcaacgcccgattccaaagtgattgcgatggtagttctgaccaacgaggagctcatgatcgccaaagacacgaaagaaatcattgagaaagggttggacgagcttaagatc

SEQ ID NO: 898 - protein, 417 aa, synthetic construct
  REGION 1..417: note = variant of acetate kinase from Marinitoga sp.38H-ov
MHHHHHHGGSGMKVLVINSGSSSIKYQLLDMTNEKVLAKGLVERIGIDGSRIVHKVNGEGHVLEHEIKNHEIGLKLVLDLLTDEKYGVLKDLKEIDAVGHRVVHGGERFASSVKITDEVLKTIETLSFLAPLHNPANIMGIKSSMKVLPGVPQVAVFDTAFHQKMPEKAYLYAIPYEYYEKYKIRRYGFHGTSHRYVSKRAAEIMGKPYDQLKIITVHVGNGASVAAVKNGVSVDTSMGFTPLEGLVMGTRSGDIDPAIVEFLEKEEGLSAKEVVNILNKKSGVYGLTKGFSSDMRDIVLKAIEGDPVCRLALDVYYYRIAKYIGAYAAAMNGVDAIVFTAGVGENSPIMREEIIENYLGYLGIKIDKEANDFKGEEKIISTPDSKVIAMVVLTNEELMIAKDTKEIIEKGLDELKI

SEQ ID NO: 899 - DNA, 1251 bp, synthetic construct
  misc_feature 1..1251: note = variant of acetate kinase from Marinitoga sp.38H-ov
  source 1..1251: mol_type = other DNA
atgcaccatcatcatcatcatggcggtagcggcatgaaagttctggtgattgcgtctggtagctcctccatcaaatatcagctcctcgatatgaccaacgaaaaggtattagcgaaaggcttggtcgagcgcattggcatcgacggttcgcgtatcgtgcataaagttaacggcgaagggcacgtgctggaacatgagattaaaaatcacgaaattggacttaaattggtcctggatcttcttacggacgaaaaatacggtgtgttgaaggatctcaaagaaatcgatgcagttgggcatcgcgtagtacatggcggcgagcgttttgccagtagcgtgaagattactgacgaagtcttaaagaccatcgagacgttgtcgttcttagctccgttacacaatccagcgaacattatgggtatcaagagcagcatgaaagtgttaccgggtgtgcctcaagttgccgtctttgatacagcgttccaccagaagatgccggagaaagcctatttgtacgcaatcccctatgagtactacgagaaatataaaattcgccgctatgggtttcatggaacctcacatcgttatgtgagtaaacgtgctgcggaaattatgggcaaaccgtacgatcagctcaagatcattaccgttcacgtgggtaacggcgcatcagttgcggcggtgaagaatggcgtatctgttgacacttccatgggtttcacaccacttgaaggtcttgtcatgggcacgcgcagcggcgatattgatccggccatcgtggaatttcttgagaaagaagaaggattgtcggccaaagaagtcgtcaacatcctcaacaagaaatctggtgtgtatgggctcaccaaaggctttagtagtgacatgcgtgacattgtgctgaaggctattgaaggtgatcctgtatgccgccttgcattagatgtgtattattatcgtatcgcgaaatatattggcgcatacgctgcggccatgaacggtgttgacgcgatcgtctttaccgcaggagttggcgaaaatagcccgattatgcgcgaagaaattattgagaactacttgggctacttagggatcaagatcgataaagaagccaatgacttcaaaggtgaggagaagatcatttcaacgcccgattccaaagtgattgcgatggtagttccgaccaacgaggagctcatgatcgccaaagacacgaaagaaatcattgagaaagggttggacgagcttaagatc

SEQ ID NO: 900 - protein, 417 aa, synthetic construct
  REGION 1..417: note = variant of acetate kinase from Marinitoga sp.38H-ov
MHHHHHHGGSGMKVLVIASGSSSIKYQLLDMTNEKVLAKGLVERIGIDGSRIVHKVNGEGHVLEHEIKNHEIGLKLVLDLLTDEKYGVLKDLKEIDAVGHRVVHGGERFASSVKITDEVLKTIETLSFLAPLHNPANIMGIKSSMKVLPGVPQVAVFDTAFHQKMPEKAYLYAIPYEYYEKYKIRRYGFHGTSHRYVSKRAAEIMGKPYDQLKIITVHVGNGASVAAVKNGVSVDTSMGFTPLEGLVMGTRSGDIDPAIVEFLEKEEGLSAKEVVNILNKKSGVYGLTKGFSSDMRDIVLKAIEGDPVCRLALDVYYYRIAKYIGAYAAAMNGVDAIVFTAGVGENSPIMREEIIENYLGYLGIKIDKEANDFKGEEKIISTPDSKVIAMVVPTNEELMIAKDTKEIIEKGLDELKI

SEQ ID NO: 901 - DNA, 1251 bp, synthetic construct
  misc_feature 1..1251: note = variant of acetate kinase from Marinitoga sp.38H-ov
  source 1..1251: mol_type = other DNA
atgcaccatcatcatcatcatggcggtagcggcatgaaagttctggtgattaattctggtagctcctccatcaaatatcagctcctcgatatgaccaacgaaaaggtattagcgaaaggcttggtcgagcgcattggcatcgacggttcgcgtatcgtgcataaagttaacggcgaagggcacgtgctggaacatgagattaaaaatcacgaaattggacttaaattggtcctggatcttcttacggacgaaaaatacggtgtgttgaaggatctcaaagaaatcgatgcagttgggcatcgcgtagtacatggcggcgagcgttttgccagtagcgtgaagattactgacgaagtcttaaagaccatcgagacgttgtcgttcttagctccgttacacaatccagcgaacattatgggtatcaagagcagcatgaaagtgttaccgggtgtgcctcaagttgccgtctttgatacagcgttccaccagaagatgccggagaaagcctatttgtacgcaatcccctatgagtactacgagaaatataaaattcgccgctatgggtttcatggaacctcacatcgttatgtgagtaaacgtgctgcggaaattatgggcaaaccgtacgatcagctcaagatcattaccgttcacgtgggtaacggcgcatcagttgcggcggtgaagaatggcgtatctgttgacacttccatgggtttcacaccacttgaaggtcttgtcatgggcacgcgcagcggcgatattgatccggccatcgtggaatttcttgagaaagaagaaggattgtcggccaaagaagtcgtcaacatcctcaacaagaaatctggtgtgtatgggctcaccaaaggctttagtagtgacatgcgtgacattattctgaaggctattgaaggtgatcctgtatgccgccttgcattagatgtgtattattatcgtatcgcgaaatatattggcgcatacgctgcggccatgaacggtgttgacgcgatcgtctttaccgcaggagttggcgaaaatagcccgattatgcgcgaagaaattattgagaactacttgggctacttagggatcaagatcgataaagaagccaatgacttcaaaggtgaggagaagatcatttcaacgcccgattccaaagtgattgcgatggtagttccgaccaacgaggagctcatgatcgccaaagacacgaaagaaatcattgagaaagggttggacgagcttaagatc

SEQ ID NO: 902 - protein, 417 aa, synthetic construct
  REGION 1..417: note = variant of acetate kinase from Marinitoga sp.38H-ov
MHHHHHHGGSGMKVLVINSGSSSIKYQLLDMTNEKVLAKGLVERIGIDGSRIVHKVNGEGHVLEHEIKNHEIGLKLVLDLLTDEKYGVLKDLKEIDAVGHRVVHGGERFASSVKITDEVLKTIETLSFLAPLHNPANIMGIKSSMKVLPGVPQVAVFDTAFHQKMPEKAYLYAIPYEYYEKYKIRRYGFHGTSHRYVSKRAAEIMGKPYDQLKIITVHVGNGASVAAVKNGVSVDTSMGFTPLEGLVMGTRSGDIDPAIVEFLEKEEGLSAKEVVNILNKKSGVYGLTKGFSSDMRDIILKAIEGDPVCRLALDVYYYRIAKYIGAYAAAMNGVDAIVFTAGVGENSPIMREEIIENYLGYLGIKIDKEANDFKGEEKIISTPDSKVIAMVVPTNEELMIAKDTKEIIEKGLDELKI

SEQ ID NO: 903 - DNA, 1251 bp, synthetic construct
  misc_feature 1..1251: note = variant of acetate kinase from Marinitoga sp.38H-ov
  source 1..1251: mol_type = other DNA
atgcaccatcatcatcatcatggcggtagcggcatgaaagttctggtgattaattctggtagctcctccatcaaatatcagctcctcgatatgaccaacgaaaaggtattagcgaaaggcttggtcgagcgcattggcatcgacggttcgcgtatcgtgcataaagttaacggcgaagggcacgtgctggaacatgagattaaaaatcacgaaattggacttaaattggtcctggatcttcttacggacgaaaaatacggtgtgttgaaggatctcaaagaaatcgatgcagttgggcatcgcgtagtacatggcggcgagcgttttgccagtagcgtgaagattactgacgaagtcttaaagaccatcgagacgttgtcgttcttagctccgttacacaatccagcgaacattatgggtatcaagagcagcatgaaagtgttaccgggtgtgcctcaagttgccgtctttgatacagcgttccaccagaagatgccggagaaagcctatttgtacgcaatcccctatgagtactacgagaaatataaaattcgccgctatgggtttcatggaacctcacatcgttatgtgagtaaacgtgctgcggaaattatgggcaaaccgtacgatcagctcaagatcattaccgttcacgtgggtaacggcgcatcagttgcggcggtgaagaatggcgtatctgttgacacttccatgggtttcacaccacttgaaggtcttgtcatgggcacgcgcagcggcgatattgatccggccatcgtggaatttcttgagaaagaagaaggattgtcggccaaagaagtcgtcaacatcctcaacaagaaatctggtgtgtatgggctcaccaaaggctttagtagtgacatgcgtgacattgtgctgaaggctattgaaggtgatcctgtatgccgccttgcattagatgtgcattattatcgtatcgcgaaatatattggcgcatacgctgcggccatgaacggtgttgacgcgatcgtctttaccgcaggagttggcgaaaatagcccgattatgcgcgaagaaattattgagaactacttgggctacttagggatcaagatcgataaagaagccaatgacttcaaaggtgaggagaagatcatttcaacgcccgattccaaagtgattgcgatggtagttccgaccaacgaggagctcatgatcgccaaagacacgaaagaaatcattgagaaagggttggacgagcttaagatc

SEQ ID NO: 904 - protein, 417 aa, synthetic construct
  REGION 1..417: note = variant of acetate kinase from Marinitoga sp.38H-ov
MHHHHHHGGSGMKVLVINSGSSSIKYQLLDMTNEKVLAKGLVERIGIDGSRIVHKVNGEGHVLEHEIKNHEIGLKLVLDLLTDEKYGVLKDLKEIDAVGHRVVHGGERFASSVKITDEVLKTIETLSFLAPLHNPANIMGIKSSMKVLPGVPQVAVFDTAFHQKMPEKAYLYAIPYEYYEKYKIRRYGFHGTSHRYVSKRAAEIMGKPYDQLKIITVHVGNGASVAAVKNGVSVDTSMGFTPLEGLVMGTRSGDIDPAIVEFLEKEEGLSAKEVVNILNKKSGVYGLTKGFSSDMRDIVLKAIEGDPVCRLALDVHYYRIAKYIGAYAAAMNGVDAIVFTAGVGENSPIMREEIIENYLGYLGIKIDKEANDFKGEEKIISTPDSKVIAMVVPTNEELMIAKDTKEIIEKGLDELKI

SEQ ID NO: 905 - DNA, 1251 bp, synthetic construct
  misc_feature 1..1251: note = variant of acetate kinase from Marinitoga sp.38H-ov
  source 1..1251: mol_type = other DNA
atgcaccatcatcatcatcatggcggtagcggcatgaaagttctggtgattaattctggtagctcctccatcaaatatcagctcctcgatatgaccaacgaaaaggtattagcgaaaggcttggtcgagcgcattggcatcgacggttcgcgtatcgtgcataaagttaacggcgaagggcacgtgctggaacatgagattaaaaatcacgaaattggacttaaattggtcctggatcttcttacggacgaaaaatacggtgtgttgaaggatctcaaagaaatcgatgcagttgggcatcgcgtagtacatggcggcgagcgttttgccagtagcgtgaagattactgacgaagtcttaaagaccatcgagacgttgtcgttcttagctccgttacacaatccagcgaacattatgggtatcaagagcagcatgaaagtgttaccgggtgtgcctcaagttgccgtctttgatacagcgttccaccagaagatgccggagaaagcctatttgtacgcaatcccctatgagtactacgagaaatataaaattcgccgctatgggtttcatggaacctcacatcgttatgtgagtaaacgtgctgcggaaattatgggcaaaccgtacgatcagctcaagatcattaccgttcacgtgggtaacggcgcatcagttgcggcggtgaagaatggcgtatctgttgacacttccatgggtttcacaccacttgaaggtcttgtcatgggcacgcgcagcggcgatattgatccggccatcgtggaatttcttgagaaagaagaaggattgtcggccaaagaagtcgtcaacatcctcaacaagaaatctggtgtgtatgggctcaccaaaggctttagtagtgacatgcgtgacattgtgctgaaggctattgaaggtgatcctgtatgccgccttgcattagatgtgtattattatcgtatcgcgaaatatattggcgcatacgctgcggccatgaacggtgttgacgcgatcgtctttaccgcaggagtttgtgaaaatagcccgattatgcgcgaagaaattattgagaactacttgggctacttagggatcaagatcgataaagaagccaatgacttcaaaggtgaggagaagatcatttcaacgcccgattccaaagtgattgcgatggtagttccgaccaacgaggagctcatgatcgccaaagacacgaaagaaatcattgagaaagggttggacgagcttaagatc

SEQ ID NO: 906 - protein, 417 aa, synthetic construct
  REGION 1..417: note = variant of acetate kinase from Marinitoga sp.38H-ov
MHHHHHHGGSGMKVLVINSGSSSIKYQLLDMTNEKVLAKGLVERIGIDGSRIVHKVNGEGHVLEHEIKNHEIGLKLVLDLLTDEKYGVLKDLKEIDAVGHRVVHGGERFASSVKITDEVLKTIETLSFLAPLHNPANIMGIKSSMKVLPGVPQVAVFDTAFHQKMPEKAYLYAIPYEYYEKYKIRRYGFHGTSHRYVSKRAAEIMGKPYDQLKIITVHVGNGASVAAVKNGVSVDTSMGFTPLEGLVMGTRSGDIDPAIVEFLEKEEGLSAKEVVNILNKKSGVYGLTKGFSSDMRDIVLKAIEGDPVCRLALDVYYYRIAKYIGAYAAAMNGVDAIVFTAGVCENSPIMREEIIENYLGYLGIKIDKEANDFKGEEKIISTPDSKVIAMVVPTNEELMIAKDTKEIIEKGLDELKI

SEQ ID NO: 907 - DNA, 1251 bp, synthetic construct
  misc_feature 1..1251: note = variant of acetate kinase from Marinitoga sp.38H-ov
  source 1..1251: mol_type = other DNA
atgcaccatcatcatcatcatggcggtagcggcatgaaagttctggtgattaattctggtagctcctccatcaaatatcagctcctcgatatgaccaacgaaaaggtattagcgaaaggcttggtcgagcgcattggcatcgacggttcgcgtatcgtgcataaagttaacggcgaagggcacgtgctggaacatgagattaaaaatcacgaaattggacttaaattggtcctggatcttcttacggacgaaaaatacggtgtgttgaaggatctcaaagaaatcgatgcagttgggcatcgcgtagtacatggcggcgagcgttttgccagtagcgtgaagattactgacgaagtcttaaagaccatcgagacgttgtcgttcttagctccgttacacaatccagcgaacattatgggtatcaagagcagcatgaaagtgttaccgggtgtgcctcaagttgccgtctttgatacagcgttccaccagaagatgccggagaaagcctatttgtacgcaatcccctatgagtactacgagaaatataaaattcgccgctatgggtttcatggaacctcacatcgttatgtgagtaaacgtgctgcggaaattatgggcaaaccgtacgatcagctcaagatcattaccgttcacgtgggtaacggcgcatcagttgcggcggtgaagaatggcgtatctgttgacacttccatgggtttcacaccacttgaaggtcttgtcatgggcacgcgcagcggcgatattgatccggccatcgtggaatttcttgagaaagaagaaggattgtcggccaaagaagtcgtcaacatcctcaacaagaaatctggtgtgtatgggctcaccaaaggctttagtagtgacatgcgtgacattgtgctgaaggctattgaaggtgatcctgtatgccgccttgcattagatgtgtattattatcgtatcgcgaaatatattggcgcatacgctgcggccatgaacggtgttgacgcgatcgtctttaccgcaggagttggcgaaaatagcccgattatgcgcgaagaaattattgagaactacttgggctacttagggatcaagatcgataaagaagccaatgacttcaaaggtgaggagaagatcatttcaacgcccgattccaaagtgattgcgatggtagttccgaccaacgaggagctcatgccggccaaagacacgaaagaaatcattgagaaagggttggacgagcttaagatc

SEQ ID NO: 908 - protein, 417 aa, synthetic construct
  REGION 1..417: note = variant of acetate kinase from Marinitoga sp.38H-ov
MHHHHHHGGSGMKVLVINSGSSSIKYQLLDMTNEKVLAKGLVERIGIDGSRIVHKVNGEGHVLEHEIKNHEIGLKLVLDLLTDEKYGVLKDLKEIDAVGHRVVHGGERFASSVKITDEVLKTIETLSFLAPLHNPANIMGIKSSMKVLPGVPQVAVFDTAFHQKMPEKAYLYAIPYEYYEKYKIRRYGFHGTSHRYVSKRAAEIMGKPYDQLKIITVHVGNGASVAAVKNGVSVDTSMGFTPLEGLVMGTRSGDIDPAIVEFLEKEEGLSAKEVVNILNKKSGVYGLTKGFSSDMRDIVLKAIEGDPVCRLALDVYYYRIAKYIGAYAAAMNGVDAIVFTAGVGENSPIMREEIIENYLGYLGIKIDKEANDFKGEEKIISTPDSKVIAMVVPTNEELMPAKDTKEIIEKGLDELKI

SEQ ID NO: 909 - DNA, 1251 bp, synthetic construct
  misc_feature 1..1251: note = variant of acetate kinase from Marinitoga sp.38H-ov
  source 1..1251: mol_type = other DNA
atgcaccatcatcatcatcatggcggtagcggcatgaaagttctggtgattaattctggtagctcctccatcaaatatcagctcctcgatatgaccaacgaaaaggtattagcgaaaggcttggtcgagcgcattggcatcgacggttcgcgtatcgtgcataaagttaacggcgaagggcacgtgctggaacatgagattaaaaatcacgaaattggacttaaattggtcctggatcttcttacggacgaaaaatacggtgtgttgaaggatctcaaagaaatcgatgcagttgggcatcgcgtagtacatggcggcgagcgttttgccagtagcgtgaagattactgacgaagtcttaaagaccatcgagacgttgtcgttcttagctccgttacacaatccagcgaacattatgggtatcaagagcagcatgaaagtgttaccgggtgtgcctcaagttgccgtctttgatacagcgttccaccagaagatgccggagaaagcctatttgtacgcaatcccctatgagtactacgagaaatataaaattcgccgctatgggtttcatggaacctcacatcgttatgtgagtaaacgtgctgcggaaattatgggcaaaccgtacgatcagctcaagatcattaccgttcacgtgggtaacggcgcatcagttgcggcggtgaagaatggcgtatctgttgacacttccatgggtttcacaccacttgaaggtcttgtcatgggcacgcgcagcggcgatattgatccggccatcgtggaatttcttgagaaagaagaaggattgtcggccaaagaagtcgtcaacatcctcaacaagaaatctggtgtgtatgggctcaccaaaggctttagtagtgacatgcgtgacattgtgctgaaggctattgaaggtgatcctgtatgccgccttgcattagatgtgtattattatcgtatcgcgaaatatattggcgcatacgctgcggccatgaacggtgttgacgcgatcgtctttccggcaggagttggcgaaaatagcccgattatgcgcgaagaaattattgagaactacttgggctacttagggatcaagatcgataaagaagccaatgacttcaaaggtgaggagaagatcatttcaacgcccgattccaaagtgattgcgatggtagttccgaccaacgaggagctcatgatcgccaaagacacgaaagaaatcattgagaaagggttggacgagcttaagatc

SEQ ID NO: 910 - protein, 417 aa, synthetic construct
  REGION 1..417: note = variant of acetate kinase from Marinitoga sp.38H-ov
MHHHHHHGGSGMKVLVINSGSSSIKYQLLDMTNEKVLAKGLVERIGIDGSRIVHKVNGEGHVLEHEIKNHEIGLKLVLDLLTDEKYGVLKDLKEIDAVGHRVVHGGERFASSVKITDEVLKTIETLSFLAPLHNPANIMGIKSSMKVLPGVPQVAVFDTAFHQKMPEKAYLYAIPYEYYEKYKIRRYGFHGTSHRYVSKRAAEIMGKPYDQLKIITVHVGNGASVAAVKNGVSVDTSMGFTPLEGLVMGTRSGDIDPAIVEFLEKEEGLSAKEVVNILNKKSGVYGLTKGFSSDMRDIVLKAIEGDPVCRLALDVYYYRIAKYIGAYAAAMNGVDAIVFPAGVGENSPIMREEIIENYLGYLGIKIDKEANDFKGEEKIISTPDSKVIAMVVPTNEELMIAKDTKEIIEKGLDELKI

SEQ ID NO: 911 - DNA, 1251 bp, synthetic construct
  misc_feature 1..1251: note = variant of acetate kinase from Marinitoga sp.38H-ov
  source 1..1251: mol_type = other DNA
atgcaccatcatcatcatcatggcggtagcggcatgaaagttctggtgattaattctggtagctcctccatcaaatatcagctcctcgatatgaccaacgaaaaggtattagcgaaaggcttggtcgagcgcattggcatcgacggttcgcgtatcgtgcataaagttaacggcgaagggcacgtgctggaacatgagattaaaaatcacgaaattggacttaaattggtcctggatcttcttacggacgaaaaatacggtgtgttgaaggatctcaaagaaatcgatgcagttgggcatcgcgtagtacatggcggcgagcgttttgccagtagcgtgaagattactgacgaagtcttaaagaccatcgagacgttgtcgttcttagctccgttacacaatccagcgaacattatgggtatcaagagcagcatgaaagtgttaccgggtgtgcctcaagttgccgtctttgatacagcgttccaccagaagatgccggagaaagcctatttgtacgcaatcccctatgagtactacgagaaatataaaattcgccgctatgggtttcatggaacctcacatcgttatgtgagtaaacgtgctgcggaaattatgggcaaaccgtacgatcagctcaagatcattaccgttcacgtgggtaacggcgcatcagttgcggcggtgaagaatggcgtatctgttgacacttccatgggtttcacaccacttgaaggtcttgtcatgggcacgcgcagcggcgatattgatccggccatcgtggaatttcttgagaaagaagaaggattgtcggccaaagaagtcgtcaacatcctcaacaagaaatctggtgtgtatgggctcaccaaaggctttagtagtgacatgcgtgacattgtgctgaaggctattgaaggtgatcctgtatgccgccttgcattagatgtgtattattatcgtatcgcgaaatatattggcgcatacgctgcggccatgaacggtgttgacgcgatcgtctttaccgcaggagttggcgaaaatcggccgattatgcgcgaagaaattattgagaactacttgggctacttagggatcaagatcgataaagaagccaatgacttcaaaggtgaggagaagatcatttcaacgcccgattccaaagtgattgcgatggtagttccgaccaacgaggagctcatgatcgccaaagacacgaaagaaatcattgagaaagggttggacgagcttaagatc

SEQ ID NO: 912 - protein, 417 aa, synthetic construct
  REGION 1..417: note = variant of acetate kinase from Marinitoga sp.38H-ov
MHHHHHHGGSGMKVLVINSGSSSIKYQLLDMTNEKVLAKGLVERIGIDGSRIVHKVNGEGHVLEHEIKNHEIGLKLVLDLLTDEKYGVLKDLKEIDAVGHRVVHGGERFASSVKITDEVLKTIETLSFLAPLHNPANIMGIKSSMKVLPGVPQVAVFDTAFHQKMPEKAYLYAIPYEYYEKYKIRRYGFHGTSHRYVSKRAAEIMGKPYDQLKIITVHVGNGASVAAVKNGVSVDTSMGFTPLEGLVMGTRSGDIDPAIVEFLEKEEGLSAKEVVNILNKKSGVYGLTKGFSSDMRDIVLKAIEGDPVCRLALDVYYYRIAKYIGAYAAAMNGVDAIVFTAGVGENRPIMREEIIENYLGYLGIKIDKEANDFKGEEKIISTPDSKVIAMVVPTNEELMIAKDTKEIIEKGLDELKI

SEQ ID NO: 913 - DNA, 1251 bp, synthetic construct
  misc_feature 1..1251: note = variant of acetate kinase from Marinitoga sp.38H-ov
  source 1..1251: mol_type = other DNA
atgcaccatcatcatcatcatggcggtagcggcatgaaagttctggtgattaattctggtagctcctccatcaaatatcagctcctcgatatgaccaacgaaaaggtattagcgaaaggcttggtcgagcgcattggcatcgacggttcgcgtatcgtgcataaagttaacggcgaagggcacgtgctggaacatgagattaaaaatcacgaaattggacttaaattggtcctggatcttcttacggacgaaaaatacggtgtgttgaaggatctcaaagaaatcgatgcagttgggcatcgcgtagtacatggcggcgagcgttttgccagtagcgtgaagattactgacgaagtcttaaagaccatcgagacgttgtcgttcttagctccgttacacaatccagcgaacattatgggtatcaagagcagcatgaaagtgttaccgggtgtgcctcaagttgccgtctttgatacagcgttccaccagaagatgccggagaaagcctatttgtacgcaatcccctatgagtactacgagaaatataaaattcgccgctatgggtttcatggaacctcacatcgttatgtgagtaaacgtgctgcggaaattatgggcaaaccgtacgatcagctcaagatcattacctggcacgtgggtaacggcgcatcagttgcggcggtgaagaatggcgtatctgttgacacttccatgggtttcacaccacttgaaggtcttgtcatgggcacgcgcagcggcgatattgatccggccatcgtggaatttcttgagaaagaagaaggattgtcggccaaagaagtcgtcaacatcctcaacaagaaatctggtgtgtatgggctcaccaaaggctttagtagtgacatgcgtgacattgtgctgaaggctattgaaggtgatcctgtatgccgccttgcattagatgtgtattattatcgtatcgcgaaatatattggcgcatacgctgcggccatgaacggtgttgacgcgatcgtctttaccgcaggagttggcgaaaatagcccgattatgcgcgaagaaattattgagaactacttgggctacttagggatcaagatcgataaagaagccaatgacttcaaaggtgaggagaagatcatttcaacgcccgattccaaagtgattgcgatggtagttccgaccaacgaggagctcatgatcgccaaagacacgaaagaaatcattgagaaagggttggacgagcttaagatc

SEQ ID NO: 914 - protein, 417 aa, synthetic construct
  REGION 1..417: note = variant of acetate kinase from Marinitoga sp.38H-ov
MHHHHHHGGSGMKVLVINSGSSSIKYQLLDMTNEKVLAKGLVERIGIDGSRIVHKVNGEGHVLEHEIKNHEIGLKLVLDLLTDEKYGVLKDLKEIDAVGHRVVHGGERFASSVKITDEVLKTIETLSFLAPLHNPANIMGIKSSMKVLPGVPQVAVFDTAFHQKMPEKAYLYAIPYEYYEKYKIRRYGFHGTSHRYVSKRAAEIMGKPYDQLKIITWHVGNGASVAAVKNGVSVDTSMGFTPLEGLVMGTRSGDIDPAIVEFLEKEEGLSAKEVVNILNKKSGVYGLTKGFSSDMRDIVLKAIEGDPVCRLALDVYYYRIAKYIGAYAAAMNGVDAIVFTAGVGENSPIMREEIIENYLGYLGIKIDKEANDFKGEEKIISTPDSKVIAMVVPTNEELMIAKDTKEIIEKGLDELKI

SEQ ID NO: 915 - DNA, 1251 bp, synthetic construct
  misc_feature 1..1251: note = variant of acetate kinase from Marinitoga sp.38H-ov
  source 1..1251: mol_type = other DNA
atgcaccatcatcatcatcatggcggtagcggcatgaaagttctggtgattaattctggtagctcctccatcaaatatcagctcctcgatatgaccaacgaaaaggtattagcgaaaggcttggtcgagcgcattggcatcgacggttcgcgtatcgtgcataaagttaacggcgaagggcacgtgctggaacatgagattaaaaatcacgaaattggacttaaattggtcctggatcttcttacggacgaaaaatacggtgtgttgaaggatctcaaagaaatcgatgcagttgggcatcgcgtagtacatggcggcgagcgttttgccagtagcgtgaagattactgacgaagtcttaaagaccatcgagacgttgtcgttcttagctccgttacacaatccagcgaacattatgggtatcaagagcagcatgaaagtgttaccgggtgtgcctcaagttgccgtctttgatacagcgttccaccagaagatgccggagaaagcctatttgtacgcaatcccctatgagtactacgagaaatataaaattcgccgctatgggtttcatggaacctcacatcgttatgtgagtaaacgtgctgcggaaattatgggcaaaccgtacgatcagctcaagatcattaccgttcacgtgggtaacggcgcatcagttgcggcggtgaagaatggcgtatctgttgacacttccatgggtttcacaccacttgaaggtcttgtcatgggcacgcgcagcggcgatattgatccggccatcgtggaatttcttgagaaagaagaaggattgtcggccaaagaagtcgtcaacatcctcaacaagaaatctggtgtgtatgggctcaccaaaggctttagtagtgacatgcgtgacattgtgctgaaggctattgaaggtgatcctgtatgccgccttgcattagatgtgtattattatcgtatcgcgaaatatattggcgcatacgctgcggccatgaacggtgttgacgcgatcgtctttaccgcaggagttggcgaaaatagcccgattatgcgcgaagaaattattgagaactacttgggctacttagggatcaagatcgataaagaagccaatgacttcaaaggtgaggagaagatcatttcaacgcccgattccaaagtgattgcgatggtagttccgcataacgaggagctcatgatcgccaaagacacgaaagaaatcattgagaaagggttggacgagcttaagatc

SEQ ID NO: 916 - protein, 417 aa, synthetic construct
  REGION 1..417: note = variant of acetate kinase from Marinitoga sp.38H-ov
MHHHHHHGGSGMKVLVINSGSSSIKYQLLDMTNEKVLAKGLVERIGIDGSRIVHKVNGEGHVLEHEIKNHEIGLKLVLDLLTDEKYGVLKDLKEIDAVGHRVVHGGERFASSVKITDEVLKTIETLSFLAPLHNPANIMGIKSSMKVLPGVPQVAVFDTAFHQKMPEKAYLYAIPYEYYEKYKIRRYGFHGTSHRYVSKRAAEIMGKPYDQLKIITVHVGNGASVAAVKNGVSVDTSMGFTPLEGLVMGTRSGDIDPAIVEFLEKEEGLSAKEVVNILNKKSGVYGLTKGFSSDMRDIVLKAIEGDPVCRLALDVYYYRIAKYIGAYAAAMNGVDAIVFTAGVGENSPIMREEIIENYLGYLGIKIDKEANDFKGEEKIISTPDSKVIAMVVPHNEELMIAKDTKEIIEKGLDELKI

SEQ ID NO: 917 - DNA, 1251 bp, synthetic construct
  misc_feature 1..1251: note = variant of acetate kinase from Marinitoga sp.38H-ov
  source 1..1251: mol_type = other DNA
atgcaccatcatcatcatcatggcggtagcggcatgaaagttctggtgattaattctggtagccattccatcaaatatcagctcctcgatatgaccaacgaaaaggtattagcgaaaggcttggtcgagcgcattggcatcgacggttcgcgtatcgtgcataaagttaacggcgaagggcacgtgctggaacatgagattaaaaatcacgaaattggacttaaattggtcctggatcttcttacggacgaaaaatacggtgtgttgaaggatctcaaagaaatcgatgcagttgggcatcgcgtagtacatggcggcgagcgttttgccagtagcgtgaagattactgacgaagtcttaaagaccatcgagacgttgtcgttcttagctccgttacacaatccagcgaacattatgggtatcaagagcagcatgaaagtgttaccgggtgtgcctcaagttgccgtctttgatacagcgttccaccagaagatgccggagaaagcctatttgtacgcaatcccctatgagtactacgagaaatataaaattcgccgctatgggtttcatggaacctcacatcgttatgtgagtaaacgtgctgcggaaattatgggcaaaccgtacgatcagctcaagatcattaccgttcacgtgggtaacggcgcatcagttgcggcggtgaagaatggcgtatctgttgacacttccatgggtttcacaccacttgaaggtcttgtcatgggcacgcgcagcggcgatattgatccggccatcgtggaatttcttgagaaagaagaaggattgtcggccaaagaagtcgtcaacatcctcaacaagaaatctggtgtgtatgggctcaccaaaggctttagtagtgacatgcgtgacattgtgctgaaggctattgaaggtgatcctgtatgccgccttgcattagatgtgtattattatcgtatcgcgaaatatattggcgcatacgctgcggccatgaacggtgttgacgcgatcgtctttaccgcaggagttggcgaaaatagcccgattatgcgcgaagaaattattgagaactacttgggctacttagggatcaagatcgataaagaagccaatgacttcaaaggtgaggagaagatcatttcaacgcccgattccaaagtgattgcgatggtagttccgaccaacgaggagctcatgatcgccaaagacacgaaagaaatcattgagaaagggttggacgagcttaagatc

SEQ ID NO: 918 - protein, 417 aa, synthetic construct
  REGION 1..417: note = variant of acetate kinase from Marinitoga sp.38H-ov
MHHHHHHGGSGMKVLVINSGSHSIKYQLLDMTNEKVLAKGLVERIGIDGSRIVHKVNGEGHVLEHEIKNHEIGLKLVLDLLTDEKYGVLKDLKEIDAVGHRVVHGGERFASSVKITDEVLKTIETLSFLAPLHNPANIMGIKSSMKVLPGVPQVAVFDTAFHQKMPEKAYLYAIPYEYYEKYKIRRYGFHGTSHRYVSKRAAEIMGKPYDQLKIITVHVGNGASVAAVKNGVSVDTSMGFTPLEGLVMGTRSGDIDPAIVEFLEKEEGLSAKEVVNILNKKSGVYGLTKGFSSDMRDIVLKAIEGDPVCRLALDVYYYRIAKYIGAYAAAMNGVDAIVFTAGVGENSPIMREEIIENYLGYLGIKIDKEANDFKGEEKIISTPDSKVIAMVVPTNEELMIAKDTKEIIEKGLDELKI

SEQ ID NO: 919 - DNA, 1251 bp, synthetic construct
  misc_feature 1..1251: note = variant of acetate kinase from Marinitoga sp.38H-ov
  source 1..1251: mol_type = other DNA
atgcaccatcatcatcatcatggcggtagcggcatgaaagttctggtgattaattctggtagctcctccatcaaatatcagctcctcgatatgaccaacgaaaaggtattagcgaaaggcttggtcgagcgcattggcatcgacggttcgcgtatcgtgcataaagttaacggcgaagggcacgtgctggaacatgagattaaaaatcacgaaattggacttaaattggtcctggatcttcttacggacgaaaaatacggtgtgttgaaggatctcaaagaaatcgatgcagttgggcatcgcgtagtacatggcggcgagcgttttgccagtagcgtgaagattactgacgaagtcttaaagaccatcgagacgttgtcgttcttagctccgttacacaatccagcgaacattatgggtatcaagagcagcatgaaagtgttaccgggtgtgcctcaagttgccgtctttgatacagcgttccaccagaagatgccggagaaagcctatttgtacgcaatcccctatgagtactacgagaaatataaaattcgccgctatgggtttcatggaacctcacatcgttatgtgagtaaacgtgctgcggaaattatgggcaaaccgtacgatcagctcaagatcattaccgttcacgtgggtaacggcgcatcagttgcggcggtgaagaatggcgtatctgttgacacttccatgggtttcacaccacttgaaggtcttgtcatgggcacgcgcagcggcgatattgatccggccatcgtggaatttcttgagaaagaagaaggattgtcggccaaagaagtcgtcaacatcctcaacaagaaatctggtgtgtatgggctcaccaaaggctttagtagtgacatgcgtgacattgtgctgaaggctattgaaggtgatcctgtagcgcgccttgcattagatgtgtattattatcgtatcgcgaaatatattggcgcatacgctgcggccatgaacggtgttgacgcgatcgtctttaccgcaggagttggcgaaaatagcccgattatgcgcgaagaaattattgagaactacttgggctacttagggatcaagatcgataaagaagccaatgacttcaaaggtgaggagaagatcatttcaacgcccgattccaaagtgattgcgatggtagttccgaccaacgaggagctcatgatcgccaaagacacgaaagaaatcattgagaaagggttggacgagcttaagatc

SEQ ID NO: 920 - protein, 417 aa, synthetic construct
  REGION 1..417: note = variant of acetate kinase from Marinitoga sp.38H-ov
MHHHHHHGGSGMKVLVINSGSSSIKYQLLDMTNEKVLAKGLVERIGIDGSRIVHKVNGEGHVLEHEIKNHEIGLKLVLDLLTDEKYGVLKDLKEIDAVGHRVVHGGERFASSVKITDEVLKTIETLSFLAPLHNPANIMGIKSSMKVLPGVPQVAVFDTAFHQKMPEKAYLYAIPYEYYEKYKIRRYGFHGTSHRYVSKRAAEIMGKPYDQLKIITVHVGNGASVAAVKNGVSVDTSMGFTPLEGLVMGTRSGDIDPAIVEFLEKEEGLSAKEVVNILNKKSGVYGLTKGFSSDMRDIVLKAIEGDPVARLALDVYYYRIAKYIGAYAAAMNGVDAIVFTAGVGENSPIMREEIIENYLGYLGIKIDKEANDFKGEEKIISTPDSKVIAMVVPTNEELMIAKDTKEIIEKGLDELKI

SEQ ID NO: 921 - DNA, 1251 bp, synthetic construct
  misc_feature 1..1251: note = variant of acetate kinase from Marinitoga sp.38H-ov
  source 1..1251: mol_type = other DNA
atgcaccatcatcatcatcatggcggtagcggcatgaaagttctggtgattaattctggtagctcctccatcaaatatcagctcctcgatatgaccaacgaaaaggtattagcgaaaggcttggtcgagcgcattggcatcgacggttcgcgtatcgtgcataaagttaacggcgaagggcacgtgctggaacatgagattaaaaatcacgaaattggacttaaattggtcctggatcttcttacggacgaaaaatacggtgtgttgaaggatctcaaagaaatcgatgcagttgggcatcgcgtagtacatggcggcgagcgttttgccagtagcgtgaagattactgacgaagtcttaaagaccatcgagacgttgtcgttcttagctccgttacacaatccagcgaacattatgggtatcaagagcagcatgaaagtgttaccgggtgtgcctcaagttgccgtctttgatacagcgttccaccagaagatgccggagaaagcctatttgtacgcaatcccctatgagtactacgagaaatataaaattcgccgctatgggtttcatggaacctcacatcgttatgtgagtaaacgtgctgcggaaattatgggcaaaccgtacgatcagctcaagatcattaccgttcacgtgggtaacggcgcatcagttgcggcggtgaagaatggcgtatctgttgacacttccatgggtttcacaccacttgaaggtcttgtcatgggcacgcgcagcggcgatattgatccggccatcgtggaatttcttgagaaagaagaaggattgtcggccaaagaagtcgtcaacatcctcaacaagaaatctggtgtgtatgggctcaccaaaggctttagtagtgacatgcgtgacattgtgctgaaggctattgaaggtgatcctgtatgccgccttgcattagatgtgtattattatcgtatcgcgaaatatattggcgcatacgctgcggccatgaacggtgttgacgcgatcgtctttaccgcaggagttggcgaaaatagcccgattatgcgcgaagaaattattgagaactacttgggctacttagggatcaagatcgataaagaagccaatggtttcaaaggtgaggagaagatcatttcaacgcccgattccaaagtgattgcgatggtagttccgaccaacgaggagctcatgatcgccaaagacacgaaagaaatcattgagaaagggttggacgagcttaagatc

SEQ ID NO: 922 - protein, 417 aa, synthetic construct
  REGION 1..417: note = variant of acetate kinase from Marinitoga sp.38H-ov
MHHHHHHGGSGMKVLVINSGSSSIKYQLLDMTNEKVLAKGLVERIGIDGSRIVHKVNGEGHVLEHEIKNHEIGLKLVLDLLTDEKYGVLKDLKEIDAVGHRVVHGGERFASSVKITDEVLKTIETLSFLAPLHNPANIMGIKSSMKVLPGVPQVAVFDTAFHQKMPEKAYLYAIPYEYYEKYKIRRYGFHGTSHRYVSKRAAEIMGKPYDQLKIITVHVGNGASVAAVKNGVSVDTSMGFTPLEGLVMGTRSGDIDPAIVEFLEKEEGLSAKEVVNILNKKSGVYGLTKGFSSDMRDIVLKAIEGDPVCRLALDVYYYRIAKYIGAYAAAMNGVDAIVFTAGVGENSPIMREEIIENYLGYLGIKIDKEANGFKGEEKIISTPDSKVIAMVVPTNEELMIAKDTKEIIEKGLDELKI

SEQ ID NO: 923 - DNA, 1251 bp, synthetic construct
  misc_feature 1..1251: note = variant of acetate kinase from Marinitoga sp.38H-ov
  source 1..1251: mol_type = other DNA
atgcaccatcatcatcatcatggcggtagcggcatgaaagttctggtgattaattctggtagctcctccatcaaatatcagctcctcgatatgaccaacgaaaaggtattagcgaaaggcttggtcgagcgcattggcatcgacggttcgcgtatcgtgcataaagttaacggcgaagggcacgtgctggaacatgagattaaaaatcacgaaattggacttaaattggtcctggatcttcttacggacgaaaaatacggtgtgttgaaggatctcaaagaaatcgatgcagttgggcatcgcgtagtacatggcggcgagcgttttgccagtagcgtgaagattactgacgaagtcttaaagaccatcgagacgttgtcgttcttagctccgttacacaatccagcgaacattatgggtatcaagagcagcatgaaagtgttaccgggtgtgcctcaagttgccgtctttgatacagcgttccaccagaagatgccggagaaagcctatttgtacgcaatcccctatgagtactacgagaaatataaaattcgccgctatgggtttcatggaacctcacatcgttatgtgagtaaacgtgctgcggaaattatgggcaaaccgtacgatcagctcaagatcattaccgttcacgtgggtaacggcgcatcagttgcggcggtgaagaatggcgtatctgttgacacttccatgggtttcacaccacttgaaggtcttgtcatgggcacgcgcagcggcgatattgatccggccatcgtggaatttcttgagaaagaagaaggattgtcggccaaagaagtcgtcaacatcctcaacaagaaatctggtgtgtatgggctcaccaaaggctttagtagtgacatgcgtgacattgtgctgaaggctattgaaggtgatcctgtatgccgccttgcattagatgtgtattattatcgtatcgcgaaatatattggcgcatacgctgcggccatgaacggtgttgacgcgatcgtctttaccgcaggagttggcgaaaatccgccgattatgcgcgaagaaattattgagaactacttgggctacttagggatcaagatcgataaagaagccaatgacttcaaaggtgaggagaagatcatttcaacgcccgattccaaagtgattgcgatggtagttccgaccaacgaggagctcatgatcgccaaagacacgaaagaaatcattgagaaagggttggacgagcttaagatc

SEQ ID NO: 924 - protein, 417 aa, synthetic construct
  REGION 1..417: note = variant of acetate kinase from Marinitoga sp.38H-ov
MHHHHHHGGSGMKVLVINSGSSSIKYQLLDMTNEKVLAKGLVERIGIDGSRIVHKVNGEGHVLEHEIKNHEIGLKLVLDLLTDEKYGVLKDLKEIDAVGHRVVHGGERFASSVKITDEVLKTIETLSFLAPLHNPANIMGIKSSMKVLPGVPQVAVFDTAFHQKMPEKAYLYAIPYEYYEKYKIRRYGFHGTSHRYVSKRAAEIMGKPYDQLKIITVHVGNGASVAAVKNGVSVDTSMGFTPLEGLVMGTRSGDIDPAIVEFLEKEEGLSAKEVVNILNKKSGVYGLTKGFSSDMRDIVLKAIEGDPVCRLALDVYYYRIAKYIGAYAAAMNGVDAIVFTAGVGENPPIMREEIIENYLGYLGIKIDKEANDFKGEEKIISTPDSKVIAMVVPTNEELMIAKDTKEIIEKGLDELKI

SEQ ID NO: 925 - DNA, 1251 bp, synthetic construct
  misc_feature 1..1251: note = variant of acetate kinase from Marinitoga sp.38H-ov
  source 1..1251: mol_type = other DNA
atgcaccatcatcatcatcatggcggtagcggcatgaaagttctggtgattaattctggtagctcctccatcaaatatcagctcctcgatatgaccaacgaaaaggtattagcgaaaggcttggtcgagcgcattggcatcgacggttcgcgtatcgtgcataaagttaacggcgaagggcacgtgctggaacatgagattaaaaatcacgaaattggacttaaattggtcctggatcttcttacggacgaaaaatacggtgtgttgaaggatctcaaagaaatcgatgcagttgggcatcgcgtagtacatggcggcgagcgttttgccagtagcgtgaagattactgacgaagtcttaaagaccatcgagacgttgtcgttcttagctccgttacacaatccagcgaacattatgggtatcaagagcagcatgaaagtgttaccgggtgtgcctcaagttgccgtctttgatacagcgttccaccagaagatgccggagaaagcctatttgtacgcaatcccctatgagtactacgagaaatataaaattcgccgctatgggtttcatggaacctcacatcgttatgtgagtaaacgtgctgcggaaattatgggcaaaccgtacgatcagctcaagatcattaccgttcacgtgggtaacggcgcatcagttgcggcggtgaagaatggcgtatctgttgacactaggatgggtttcacaccacttgaaggtcttgtcatgggcacgcgcagcggcgatattgatccggccatcgtggaatttcttgagaaagaagaaggattgtcggccaaagaagtcgtcaacatcctcaacaagaaatctggtgtgtatgggctcaccaaaggctttagtagtgacatgcgtgacattgtgctgaaggctattgaaggtgatcctgtatgccgccttgcattagatgtgtattattatcgtatcgcgaaatatattggcgcatacgctgcggccatgaacggtgttgacgcgatcgtctttaccgcaggagttggcgaaaatagcccgattatgcgcgaagaaattattgagaactacttgggctacttagggatcaagatcgataaagaagccaatgacttcaaaggtgaggagaagatcatttcaacgcccgattccaaagtgattgcgatggtagttccgaccaacgaggagctcatgatcgccaaagacacgaaagaaatcattgagaaagggttggacgagcttaagatc

SEQ ID NO: 926 - protein, 417 aa, synthetic construct
  REGION 1..417: note = variant of acetate kinase from Marinitoga sp.38H-ov
MHHHHHHGGSGMKVLVINSGSSSIKYQLLDMTNEKVLAKGLVERIGIDGSRIVHKVNGEGHVLEHEIKNHEIGLKLVLDLLTDEKYGVLKDLKEIDAVGHRVVHGGERFASSVKITDEVLKTIETLSFLAPLHNPANIMGIKSSMKVLPGVPQVAVFDTAFHQKMPEKAYLYAIPYEYYEKYKIRRYGFHGTSHRYVSKRAAEIMGKPYDQLKIITVHVGNGASVAAVKNGVSVDTRMGFTPLEGLVMGTRSGDIDPAIVEFLEKEEGLSAKEVVNILNKKSGVYGLTKGFSSDMRDIVLKAIEGDPVCRLALDVYYYRIAKYIGAYAAAMNGVDAIVFTAGVGENSPIMREEIIENYLGYLGIKIDKEANDFKGEEKIISTPDSKVIAMVVPTNEELMIAKDTKEIIEKGLDELKI

SEQ ID NO: 927 - DNA, 1251 bp, synthetic construct
  misc_feature 1..1251: note = variant of acetate kinase from Marinitoga sp.38H-ov
  source 1..1251: mol_type = other DNA
atgcaccatcatcatcatcatggcggtagcggcatgaaagttctggtgattaattctggtagctcctccatcaaatatcagctcctcgatatgaccaacgaaaaggtattagcgaaaggcttggtcgagcgcattggcatcgacggttcgcgtatcgtgcataaagttaacggcgaagggcacgtgctggaacatgagattaaaaatcacgaaattggacttaaattggtcctggatcttcttacggacgaaaaatacggtgtgttgaaggatctcaaagaaatcgatgcagttgggcatcgcgtagtacatggcggcgagcgttttgccagtagcgtgaagattactgacgaagtcttaaagaccatcgagacgttgtcgttcttagctccgttacacaatccagcgaacattatgggtatcaagagcagcatgaaagtgttaccgggtgtgcctcaagttgccgtctttgatacagcgttccaccagaagatgccggagaaagcctatttgtacgcaatcccctatgagtactacgagaaatataaaattcgccgctatgggtttcatggaacctcacatcgttatgtgagtaaacgtgctgcggaaattatgggcaaaccgtacgatcagctcaagatcattaccgttcacgtgggtaacggcgcatcagttgcggcggtgaagaatggcgtatctgttgacacttccatgggtttcacaccacttgaaggtcttgtcatgggcacgcgcagcggcgatattgatccggccatcgtggaatttcttgagaaagaagaaggattgtcggccaaagaagtcgtcaacatcctcaacaagaaatctggtgtgtatgggctcaccaaaggctttagtagtgacatgcgtgacattgtgctgaaggctcatgaaggtgatcctgtatgccgccttgcattagatgtgtattattatcgtatcgcgaaatatattggcgcatacgctgcggccatgaacggtgttgacgcgatcgtctttaccgcaggagttggcgaaaatagcccgattatgcgcgaagaaattattgagaactacttgggctacttagggatcaagatcgataaagaagccaatgacttcaaaggtgaggagaagatcatttcaacgcccgattccaaagtgattgcgatggtagttccgaccaacgaggagctcatgatcgccaaagacacgaaagaaatcattgagaaagggttggacgagcttaagatc

SEQ ID NO: 928 - protein, 417 aa, synthetic construct
  REGION 1..417: note = variant of acetate kinase from Marinitoga sp.38H-ov
MHHHHHHGGSGMKVLVINSGSSSIKYQLLDMTNEKVLAKGLVERIGIDGSRIVHKVNGEGHVLEHEIKNHEIGLKLVLDLLTDEKYGVLKDLKEIDAVGHRVVHGGERFASSVKITDEVLKTIETLSFLAPLHNPANIMGIKSSMKVLPGVPQVAVFDTAFHQKMPEKAYLYAIPYEYYEKYKIRRYGFHGTSHRYVSKRAAEIMGKPYDQLKIITVHVGNGASVAAVKNGVSVDTSMGFTPLEGLVMGTRSGDIDPAIVEFLEKEEGLSAKEVVNILNKKSGVYGLTKGFSSDMRDIVLKAHEGDPVCRLALDVYYYRIAKYIGAYAAAMNGVDAIVFTAGVGENSPIMREEIIENYLGYLGIKIDKEANDFKGEEKIISTPDSKVIAMVVPTNEELMIAKDTKEIIEKGLDELKI

SEQ ID NO: 929 - DNA, 1251 bp, synthetic construct
  misc_feature 1..1251: note = variant of acetate kinase from Marinitoga sp.38H-ov
  source 1..1251: mol_type = other DNA
atgcaccatcatcatcatcatggcggtagcggcatgaaagttctggtgattaattctggtagctcctccatcaaatatcagctcctcgatatgaccaacgaaaaggtattagcgaaaggcttggtcaggcgcattggcatcgacggttcgcgtatcgtgcataaagttaacggcgaagggcacgtgctggaacatgagattaaaaatcacgaaattggacttaaattggtcctggatcttcttacggacgaaaaatacggtgtgttgaaggatctcaaagaaatcgatgcagttgggcatcgcgtagtacatggcggcgagcgttttgccagtagcgtgaagattactgacgaagtcttaaagaccatcgagacgttgtcgttcttagctccgttacacaatccagcgaacattatgggtatcaagagcagcatgaaagtgttaccgggtgtgcctcaagttgccgtctttgatacagcgttccaccagaagatgccggagaaagcctatttgtacgcaatcccctatgagtactacgagaaatataaaattcgccgctatgggtttcatggaacctcacatcgttatgtgagtaaacgtgctgcggaaattatgggcaaaccgtacgatcagctcaagatcattaccgttcacgtgggtaacggcgcatcagttgcggcggtgaagaatggcgtatctgttgacacttccatgggtttcacaccacttgaaggtcttgtcatgggcacgcgcagcggcgatattgatccggccatcgtggaatttcttgagaaagaagaaggattgtcggccaaagaagtcgtcaacatcctcaacaagaaatctggtgtgtatgggctcaccaaaggctttagtagtgacatgcgtgacattgtgctgaaggctattgaaggtgatcctgtatgccgccttgcattagatgtgtattattatcgtatcgcgaaatatattggcgcatacgctgcggccatgaacggtgttgacgcgatcgtctttaccgcaggagttggcgaaaatagcccgattatgcgcgaagaaattattgagaactacttgggctacttagggatcaagatcgataaagaagccaatgacttcaaaggtgaggagaagatcatttcaacgcccgattccaaagtgattgcgatggtagttccgaccaacgaggagctcatgatcgccaaagacacgaaagaaatcattgagaaagggttggacgagcttaagatc

SEQ ID NO: 930 - protein, 417 aa, synthetic construct
  REGION 1..417: note = variant of acetate kinase from Marinitoga sp.38H-ov
MHHHHHHGGSGMKVLVINSGSSSIKYQLLDMTNEKVLAKGLVRRIGIDGSRIVHKVNGEGHVLEHEIKNHEIGLKLVLDLLTDEKYGVLKDLKEIDAVGHRVVHGGERFASSVKITDEVLKTIETLSFLAPLHNPANIMGIKSSMKVLPGVPQVAVFDTAFHQKMPEKAYLYAIPYEYYEKYKIRRYGFHGTSHRYVSKRAAEIMGKPYDQLKIITVHVGNGASVAAVKNGVSVDTSMGFTPLEGLVMGTRSGDIDPAIVEFLEKEEGLSAKEVVNILNKKSGVYGLTKGFSSDMRDIVLKAIEGDPVCRLALDVYYYRIAKYIGAYAAAMNGVDAIVFTAGVGENSPIMREEIIENYLGYLGIKIDKEANDFKGEEKIISTPDSKVIAMVVPTNEELMIAKDTKEIIEKGLDELKI

SEQ ID NO: 931 - DNA, 1251 bp, synthetic construct
  misc_feature 1..1251: note = variant of acetate kinase from Marinitoga sp.38H-ov
  source 1..1251: mol_type = other DNA
atgcaccatcatcatcatcatggcggtagcggcatgaaagttctggtgattaattctggtagctcctccatcaaatatcagctcctcgatatgaccaacgaaaaggtattagcgaaaggcttggtcgagcgcattggcatcgacggttcgcgtatcgtgcataaagttaacggcgaagggcacgtgctggaacatgagattaaaaatcacgaaattggacttaaattggtcctggatcttcttacggacgaaaaatacggtgtgttgaaggatctcaaagaaatcgatgcagttgggcatcgcgtagtacatggcggcgagcgttttgccagtagcgtgaagattactgacgaagtcttaaagaccatcgagacgttgtcgttcttagctccgttacacaatccagcgaacattatgggtatcaagagcagcatgaaagtgttaccgggtgtgcctcaagttgccgtctttgatacagcgttccaccagaagatgccggagaaagcctatttgtacgcaatcccctatgagtactacgagaaatataaaattcgccgctatgggtttcatggaacctcacatcgttatgtgagtaaacgtgctgcggaaattatgggcaaaccgtacgatcagctcaagatcattaccgttcacgtgggtaacggcgcatcagttgcggcggtgaagaatggcgtatctgttgacacttccatgggtttcacaccacttgaaggtcttgtcatgggcacgcgcagcggcgatattgatccggccatcgtggaatttcttgagaaagaagaaggattgtcggccaaagaagtcgtcaacatcctcaacaagaaatctggtgtgtatgggctcaccaaaggctttagtagtgacatgcgtgacattgtgctgaaggctattaggggtgatcctgtatgccgccttgcattagatgtgtattattatcgtatcgcgaaatatattggcgcatacgctgcggccatgaacggtgttgacgcgatcgtctttaccgcaggagttggcgaaaatagcccgattatgcgcgaagaaattattgagaactacttgggctacttagggatcaagatcgataaagaagccaatgacttcaaaggtgaggagaagatcatttcaacgcccgattccaaagtgattgcgatggtagttccgaccaacgaggagctcatgatcgccaaagacacgaaagaaatcattgagaaagggttggacgagcttaagatc

SEQ ID NO: 932 - protein, 417 aa, synthetic construct
  REGION 1..417: note = variant of acetate kinase from Marinitoga sp.38H-ov
MHHHHHHGGSGMKVLVINSGSSSIKYQLLDMTNEKVLAKGLVERIGIDGSRIVHKVNGEGHVLEHEIKNHEIGLKLVLDLLTDEKYGVLKDLKEIDAVGHRVVHGGERFASSVKITDEVLKTIETLSFLAPLHNPANIMGIKSSMKVLPGVPQVAVFDTAFHQKMPEKAYLYAIPYEYYEKYKIRRYGFHGTSHRYVSKRAAEIMGKPYDQLKIITVHVGNGASVAAVKNGVSVDTSMGFTPLEGLVMGTRSGDIDPAIVEFLEKEEGLSAKEVVNILNKKSGVYGLTKGFSSDMRDIVLKAIRGDPVCRLALDVYYYRIAKYIGAYAAAMNGVDAIVFTAGVGENSPIMREEIIENYLGYLGIKIDKEANDFKGEEKIISTPDSKVIAMVVPTNEELMIAKDTKEIIEKGLDELKI

SEQ ID NO: 933 - DNA, 1251 bp, synthetic construct
  misc_feature 1..1251: note = variant of acetate kinase from Marinitoga sp.38H-ov
  source 1..1251: mol_type = other DNA
atgcaccatcatcatcatcatggcggtagcggcatgaaagttctggtgattgagtctggtagctcctccatcaaatatcagctcctcgatatgaccaacgaaaaggtattagcgaaaggcttggtcgagcgcattggcatcgacggttcgcgtatcgtgcataaagttaacggcgaagggcacgtgctggaacatgagattaaaaatcacgaaattggacttaaattggtcctggatcttcttacggacgaaaaatacggtgtgttgaaggatctcaaagaaatcgatgcagttgggcatcgcgtagtacatggcggcgagcgttttgccagtagcgtgaagattactgacgaagtcttaaagaccatcgagacgttgtcgttcttagctccgttacacaatccagcgaacattatgggtatcaagagcagcatgaaagtgttaccgggtgtgcctcaagttgccgtctttgatacagcgttccaccagaagatgccggagaaagcctatttgtacgcaatcccctatgagtactacgagaaatataaaattcgccgctatgggtttcatggaacctcacatcgttatgtgagtaaacgtgctgcggaaattatgggcaaaccgtacgatcagctcaagatcattaccgttcacgtgggtaacggcgcatcagttgcggcggtgaagaatggcgtatctgttgacacttccatgggtttcacaccacttgaaggtcttgtcatgggcacgcgcagcggcgatattgatccggccatcgtggaatttcttgagaaagaagaaggattgtcggccaaagaagtcgtcaacatcctcaacaagaaatctggtgtgtatgggctcaccaaaggctttagtagtgacatgcgtgacattgtgctgaaggctattgaaggtgatcctgtatgccgccttgcattagatgtgtattattatcgtatcgcgaaatatattggcgcatacgctgcggccatgaacggtgttgacgcgatcgtctttaccgcaggagttggcgaaaatagcccgattatgcgcgaagaaattattgagaactacttgggctacttagggatcaagatcgataaagaagccaatgacttcaaaggtgaggagaagatcatttcaacgcccgattccaaagtgattgcgatggtagttccgaccaacgaggagctcatgatcgccaaagacacgaaagaaatcattgagaaagggttggacgagcttaagatc

SEQ ID NO: 934 - protein, 417 aa, synthetic construct
  REGION 1..417: note = variant of acetate kinase from Marinitoga sp.38H-ov
MHHHHHHGGSGMKVLVIESGSSSIKYQLLDMTNEKVLAKGLVERIGIDGSRIVHKVNGEGHVLEHEIKNHEIGLKLVLDLLTDEKYGVLKDLKEIDAVGHRVVHGGERFASSVKITDEVLKTIETLSFLAPLHNPANIMGIKSSMKVLPGVPQVAVFDTAFHQKMPEKAYLYAIPYEYYEKYKIRRYGFHGTSHRYVSKRAAEIMGKPYDQLKIITVHVGNGASVAAVKNGVSVDTSMGFTPLEGLVMGTRSGDIDPAIVEFLEKEEGLSAKEVVNILNKKSGVYGLTKGFSSDMRDIVLKAIEGDPVCRLALDVYYYRIAKYIGAYAAAMNGVDAIVFTAGVGENSPIMREEIIENYLGYLGIKIDKEANDFKGEEKIISTPDSKVIAMVVPTNEELMIAKDTKEIIEKGLDELKI

SEQ ID NO: 935 - DNA, 1251 bp, synthetic construct
  misc_feature 1..1251: note = variant of acetate kinase from Marinitoga sp.38H-ov
  source 1..1251: mol_type = other DNA
atgcaccatcatcatcatcatggcggtagcggcatgaaagttctggtgattaattctggtagctcctccatcaaatatcagctcctcgatatgaccaacgaaaaggtattagcgaaaggcttggtcgagcgcattggcatcgacggttcgcgtatcgtgcataaagttaacggcgaagggcacgtgctggaacatgagattaaaaatcacgaaattggacttaaattggtcctggatcttcttacggacgaaaaatacggtgtgttgaaggatctcaaagaaatcgatgcagttgggcatcgcgtagtacatggcggcgagcgttttgccagtagcgtgaagattactgacgaagtcttaaagaccatcgagacgttgtcgttcttagctccgttacacaatccagcgaacattatgggtatcaagagcagcatgaaagtgttaccgggtgtgcctcaagttgccgtctttgatacagcgttccaccagaagatgccggagaaagcctatttgtacgcaatcccctatgagtactacgagaaatataaaattcgccgctatgggtttcatggaacctcacatcgttatgtgagtaaacgtgctgcggaaattatgggcaaaccgtacgatcagctcaagatcattaccgttcacgtgggtaacggcgcatcagttgcggcggtgaagaatggcgtatctgttgacacttccatgggtttcacaccacttgaaggtcttgtcatgggcacgcgcagcggcgatattgatccggccatcgtggaatttcttgagaaagaagaaggattgtcggccaaagaagtcgtcaacatcctcaacaagaaatctggtgtgtatgggctcaccaaaggctttagtagtgacatgcgtgacattgtgctgaaggctattgaaggtgatcctgtatgccgccttgcattagatgtgtattattatcgtatcgcgaaatatattggcgcatacgctgcggccatgaacggtgttgacgcgatcgtctttaccgcaggagttggcgaaaatagcccgattatgcgcgaagaaattattgagaactacttgggctacttagggatcaagatcgataaagaagccaatgacttcaaacgtgaggagaagatcatttcaacgcccgattccaaagtgattgcgatggtagttccgaccaacgaggagctcatgatcgccaaagacacgaaagaaatcattgagaaagggttggacgagcttaagatc

SEQ ID NO: 936 - protein, 417 aa, synthetic construct
  REGION 1..417: note = variant of acetate kinase from Marinitoga sp.38H-ov
MHHHHHHGGSGMKVLVINSGSSSIKYQLLDMTNEKVLAKGLVERIGIDGSRIVHKVNGEGHVLEHEIKNHEIGLKLVLDLLTDEKYGVLKDLKEIDAVGHRVVHGGERFASSVKITDEVLKTIETLSFLAPLHNPANIMGIKSSMKVLPGVPQVAVFDTAFHQKMPEKAYLYAIPYEYYEKYKIRRYGFHGTSHRYVSKRAAEIMGKPYDQLKIITVHVGNGASVAAVKNGVSVDTSMGFTPLEGLVMGTRSGDIDPAIVEFLEKEEGLSAKEVVNILNKKSGVYGLTKGFSSDMRDIVLKAIEGDPVCRLALDVYYYRIAKYIGAYAAAMNGVDAIVFTAGVGENSPIMREEIIENYLGYLGIKIDKEANDFKREEKIISTPDSKVIAMVVPTNEELMIAKDTKEIIEKGLDELKI

SEQ ID NO: 937 - DNA, 1251 bp, synthetic construct
  misc_feature 1..1251: note = variant of acetate kinase from Marinitoga sp.38H-ov
  source 1..1251: mol_type = other DNA
atgcaccatcatcatcatcatggcggtagcggcatgaaagttctggtgattaattctggtagctcctccatcaaatatcagctcctcgatatgaccaacgaaaaggtattagcgaaaggcttggtcgagcgcattggcatcgacggttcgcgtatcgtgcataaagttaacggcgaagggcacgtgctggaacatgagattaaaaatcacgaaattggacttaaattggtcctggatcttcttacggacgaaaaatacggtgtgttgaaggatctcaaagaaatcgatgcagttgggcatcgcgtagtacatggcggcgagcgttttgccagtagcgtgaagattactgacgaagtcttaaagaccatcgagacgttgtcgttcttagctccgttacacaatccagcgaacattatgggtatcaagagcagcatgaaagtgttaccgggtgtgcctcaagttgccgtctttgatacagcgttccaccagaagatgccggagaaagcctatttgtacgcaatcccctatgagtactacgagaaatataaaattcgccgctatgggtttcatggaacctcacatcgttatgtgagtaaacgtgctgcggaaattatgggcaaaccgtacgatcagctcaagatcattaccgttcacgtgggtaacggcgcatcagttgcggcggtgaagaatggcgtatctgttgacacttccatgggtttcacaccacttgaaggtcttgtcatgggcacgcgcagcggcgatattgatccggccatcgtggaatttcttgagaaagaagaaggattgtcggccaaagaagtcgtcaacatcctcaacaagaaatctggtgtgtatgggctcaccaaaggctttagtagtgacatgcgtgacattgtgctgaaggctattgaaggtgatcctgtatgccgccttgcattagatgtgtattattatcgtatcgcgaaatatattggcgcatacgctgcggccatgaacggtgttgacgcgatcgtctttaccgcaggagttggcgaaaatagcccgattatgcgcgaagaaattattgagaactacttgggctacttagggatcaagatcgataaagaagccaatgacttcaaaggtgaggagaagatcatttcaacgcccgattccaaagtgattgcgatggtaaatccgaccaacgaggagctcatgatcgccaaagacacgaaagaaatcattgagaaagggttggacgagcttaagatc

SEQ ID NO: 938 - protein, 417 aa, synthetic construct
  REGION 1..417: note = variant of acetate kinase from Marinitoga sp.38H-ov
MHHHHHHGGSGMKVLVINSGSSSIKYQLLDMTNEKVLAKGLVERIGIDGSRIVHKVNGEGHVLEHEIKNHEIGLKLVLDLLTDEKYGVLKDLKEIDAVGHRVVHGGERFASSVKITDEVLKTIETLSFLAPLHNPANIMGIKSSMKVLPGVPQVAVFDTAFHQKMPEKAYLYAIPYEYYEKYKIRRYGFHGTSHRYVSKRAAEIMGKPYDQLKIITVHVGNGASVAAVKNGVSVDTSMGFTPLEGLVMGTRSGDIDPAIVEFLEKEEGLSAKEVVNILNKKSGVYGLTKGFSSDMRDIVLKAIEGDPVCRLALDVYYYRIAKYIGAYAAAMNGVDAIVFTAGVGENSPIMREEIIENYLGYLGIKIDKEANDFKGEEKIISTPDSKVIAMVNPTNEELMIAKDTKEIIEKGLDELKI

SEQ ID NO: 939 - DNA, 1251 bp, synthetic construct
  misc_feature 1..1251: note = variant of acetate kinase from Marinitoga sp.38H-ov
  source 1..1251: mol_type = other DNA
atgcaccatcatcatcatcatggcggtagcggcatgaaagttctggtgattaattctggtagctcctccatcaaatatcagctcctcgatatgaccaacgaaaaggtattagcgaaaggcttggtcgagcgcattggcatcgacggttcgcgtatcgtgcataaagttaacggcgaagggcacgtgctggaacatgagattaaaaatcacgaaattggacttaaattggtcctggatcttcttacggacgaaaaatacggtgtgttgaaggatctcaaagaaatcgatgcagttgggcatcgcgtagtacatggcggcgagcgttttgccagtagcgtgaagattactgacgaagtcttaaagaccatcgagacgttgtcgttcttagctccgttacacaatccagcgaacattatgggtatcaagagcagcatgaaagtgttaccgggtgtgcctcaagttgccgtctttgatacagcgttccaccagaagatgccggagaaagcctatttgtacgcaatcccctatgagtactacgagaaatataaaattcgccgctatgggtttcatggaacctcacatcgttatgtgagtaaacgtgctgcggaaattatgggcaaaccgtacgatcagctcaagatcattaccgttcacgtgggtaacggcgcatcagttgcggcggtgaagaatggcgtatctgttgacacttccatgggtttcacaccacttgaaggtcttgtcatgggcacgcgcagcggcgatattgatccggccatcgtggaatttcttgagaaagaagaaggattgtcggccaaagaagtcgtcaacatcctcaacaagaaatctggtgtgagggggctcaccaaaggctttagtagtgacatgcgtgacattgtgctgaaggctattgaaggtgatcctgtatgccgccttgcattagatgtgtattattatcgtatcgcgaaatatattggcgcatacgctgcggccatgaacggtgttgacgcgatcgtctttaccgcaggagttggcgaaaatagcccgattatgcgcgaagaaattattgagaactacttgggctacttagggatcaagatcgataaagaagccaatgacttcaaaggtgaggagaagatcatttcaacgcccgattccaaagtgattgcgatggtagttccgaccaacgaggagctcatgatcgccaaagacacgaaagaaatcattgagaaagggttggacgagcttaagatc

SEQ ID NO: 940 - protein, 417 aa, synthetic construct
  REGION 1..417: note = variant of acetate kinase from Marinitoga sp.38H-ov
MHHHHHHGGSGMKVLVINSGSSSIKYQLLDMTNEKVLAKGLVERIGIDGSRIVHKVNGEGHVLEHEIKNHEIGLKLVLDLLTDEKYGVLKDLKEIDAVGHRVVHGGERFASSVKITDEVLKTIETLSFLAPLHNPANIMGIKSSMKVLPGVPQVAVFDTAFHQKMPEKAYLYAIPYEYYEKYKIRRYGFHGTSHRYVSKRAAEIMGKPYDQLKIITVHVGNGASVAAVKNGVSVDTSMGFTPLEGLVMGTRSGDIDPAIVEFLEKEEGLSAKEVVNILNKKSGVRGLTKGFSSDMRDIVLKAIEGDPVCRLALDVYYYRIAKYIGAYAAAMNGVDAIVFTAGVGENSPIMREEIIENYLGYLGIKIDKEANDFKGEEKIISTPDSKVIAMVVPTNEELMIAKDTKEIIEKGLDELKI

SEQ ID NO: 941 - DNA, 1251 bp, synthetic construct
  misc_feature 1..1251: note = variant of acetate kinase from Marinitoga sp.38H-ov
  source 1..1251: mol_type = other DNA
atgcaccatcatcatcatcatggcggtagcggcatgaaagttctggtgattaattctggtagctcctccatcaaatatcagctcctcgatatgaccaacgaaaaggtattagcgaaaggcttggtcgagcgcattggcatcgacggttcgcgtatcgtgcataaagttaacggcgaagggcacgtgctggaacatgagattaaaaatcacgaaattggacttaaattggtcctggatcttcttacggacgaaaaatacggtgtgttgaaggatctcaaagaaatcgatgcagttgggcatcgcgtagtacatggcggcgagcgttttgccagtagcgtgaagattactgacgaagtcttaaagaccatcgagacgttgtcgttcttagctccgttacacaatccagcgaacattatgggtatcaagagcagcatgaaagtgttaccgggtgtgcctcaagttgccgtctttgatacagcgttccaccagaagatgccggagaaagcctatttgtacgcaatcccctatgagtactacgagaaatataaaattcgccgctatgggtttcatggaacctcacatcgttatgtgagtaaacgtgctgcggaaattatgggcaaaccgtacgatcagctcaagatcattaccgttcacgtgggtaacggcgcatcagttgcggcggtgaagaatggcgtatctgttgacacttccatgggtttcacaccacttgaaggtcttgtcatgggcacgcgcagcggcgatattgatccggccatcgtggaatttcttgagaaagaagaaggattgtcggccaaagaagtcgtcaacatcctcaacaagaaatctggtgtgtatgggctcaccaaaggcccgagtagtgacatgcgtgacattgtgctgaaggctattgaaggtgatcctgtatgccgccttgcattagatgtgtattattatcgtatcgcgaaatatattggcgcatacgctgcggccatgaacggtgttgacgcgatcgtctttaccgcaggagttggcgaaaatagcccgattatgcgcgaagaaattattgagaactacttgggctacttagggatcaagatcgataaagaagccaatgacttcaaaggtgaggagaagatcatttcaacgcccgattccaaagtgattgcgatggtagttccgaccaacgaggagctcatgatcgccaaagacacgaaagaaatcattgagaaagggttggacgagcttaagatc

SEQ ID NO: 942 - protein, 417 aa, synthetic construct
  REGION 1..417: note = variant of acetate kinase from Marinitoga sp.38H-ov
MHHHHHHGGSGMKVLVINSGSSSIKYQLLDMTNEKVLAKGLVERIGIDGSRIVHKVNGEGHVLEHEIKNHEIGLKLVLDLLTDEKYGVLKDLKEIDAVGHRVVHGGERFASSVKITDEVLKTIETLSFLAPLHNPANIMGIKSSMKVLPGVPQVAVFDTAFHQKMPEKAYLYAIPYEYYEKYKIRRYGFHGTSHRYVSKRAAEIMGKPYDQLKIITVHVGNGASVAAVKNGVSVDTSMGFTPLEGLVMGTRSGDIDPAIVEFLEKEEGLSAKEVVNILNKKSGVYGLTKGPSSDMRDIVLKAIEGDPVCRLALDVYYYRIAKYIGAYAAAMNGVDAIVFTAGVGENSPIMREEIIENYLGYLGIKIDKEANDFKGEEKIISTPDSKVIAMVVPTNEELMIAKDTKEIIEKGLDELKI

SEQ ID NO: 943 - DNA, 1251 bp, synthetic construct
  misc_feature 1..1251: note = variant of acetate kinase from Marinitoga sp.38H-ov
  source 1..1251: mol_type = other DNA
atgcaccatcatcatcatcatggcggtagcggcatgaaagttctggtgattaattctggtagctcctccatcaaatatcagctcctcgatatgaccaacgaaaaggtattagcgaaaggcttggtcgagcgcattggcatcgacggttcgcgtatcgtgcataaagttaacggcgaagggcacgtgctggaacatgagattaaaaatcacgaaattggacttaaattggtcctggatcttcttacggacgaaaaatacggtgtgttgaaggatctcaaagaaatcgatgcagttgggcatcgcgtagtacatggcggcgagcgttttgccagtagcgtgaagattactgacgaagtcttaaagaccatcgagacgttgtcgttcttagctccgttacacaatccagcgaacattatgggtatcaagagcagcatgaaagtgttaccgggtgtgcctcaagttgccgtctttgatacagcgttccaccagaagatgccggagaaagcctatttgtacgcaatcccctatgagtactacgagaaatataaaattcgccgctatgggtttcatggaacctcacatcgttatgtgagtaaacgtgctgcggaaattatgggcaaaccgtacgatcagctcaagatcattaccgttcacgtgggtaacggcgcatcagttgcggcggtgaagaatggcgtatctgttgacacttccatgggtttcacaccacttgaaggtcttgtcatgggcacgcgcagcggcgatattgatccggccatcgtggaatttcttgagaaagaagaaggattgtcggccaaagaagtcgtcaacatcctcaacaagaaatctggtgtgtatgggctcaccaaaggcagtagtagtgacatgcgtgacattgtgctgaaggctattgaaggtgatcctgtatgccgccttgcattagatgtgtattattatcgtatcgcgaaatatattggcgcatacgctgcggccatgaacggtgttgacgcgatcgtctttaccgcaggagttggcgaaaatagcccgattatgcgcgaagaaattattgagaactacttgggctacttagggatcaagatcgataaagaagccaatgacttcaaaggtgaggagaagatcatttcaacgcccgattccaaagtgattgcgatggtagttccgaccaacgaggagctcatgatcgccaaagacacgaaagaaatcattgagaaagggttggacgagcttaagatc

SEQ ID NO: 944 - protein, 417 aa, synthetic construct
  REGION 1..417: note = variant of acetate kinase from Marinitoga sp.38H-ov
MHHHHHHGGSGMKVLVINSGSSSIKYQLLDMTNEKVLAKGLVERIGIDGSRIVHKVNGEGHVLEHEIKNHEIGLKLVLDLLTDEKYGVLKDLKEIDAVGHRVVHGGERFASSVKITDEVLKTIETLSFLAPLHNPANIMGIKSSMKVLPGVPQVAVFDTAFHQKMPEKAYLYAIPYEYYEKYKIRRYGFHGTSHRYVSKRAAEIMGKPYDQLKIITVHVGNGASVAAVKNGVSVDTSMGFTPLEGLVMGTRSGDIDPAIVEFLEKEEGLSAKEVVNILNKKSGVYGLTKGSSSDMRDIVLKAIEGDPVCRLALDVYYYRIAKYIGAYAAAMNGVDAIVFTAGVGENSPIMREEIIENYLGYLGIKIDKEANDFKGEEKIISTPDSKVIAMVVPTNEELMIAKDTKEIIEKGLDELKI

SEQ ID NO: 945 - DNA, 1251 bp, synthetic construct
  misc_feature 1..1251: note = variant of acetate kinase from Marinitoga sp.38H-ov
  source 1..1251: mol_type = other DNA
atgcaccatcatcatcatcatggcggtagcggcatgaaagttctggtgattaattctggtagctcctccatcaaatatcagctcctcgatatgaccaacgaaaaggtattagcgaaaggcttggtcgagcgcattggcatcgacggttcgcgtatcgtgcataaagttaacggcgaagggcacgtgctggaacatgagattaaaaatcacgaaattggacttaaattggtcctggatcttcttacggacgaaaaatacggtgtgttgaaggatctcaaagaaatcgatgcagttgggcatcgcgtagtacatggcggcgagcgttttgccagtagcgtgaagattactgacgaagtcttaaagaccatcgagacgttgtcgttcttagctccgttacacaatccagcgaacattatgggtatcaagagcagcatgaaagtgttaccgggtgtgcctcaagttgccgtctttgatacagcgttccaccagaagatgccggagaaagcctatttgtacgcaatcccctatgagtactacgagaaatataaaattcgccgctatgggtttcatggaacctcacatcgttatgtgagtaaacgtgctgcggaaattatgggcaaaccgtacgatcagctcaagatcattaccgttcacgtgggtaacggcgcatcagttgcggcggtgaagaatggcgtatctgttgacacttccatgggtttcacaccacttgaaggtcttgtcatgggcacgcgcagcggcgatattgatccggccatcgtggaatttcttgagaaagaagaaggattgtcggccaaagaagtcgtcaacatcctcaacaagaaatctggtgtgtatgggctcaccaaaggctttagtagtgacatgcgtttgattgtgctgaaggctattgaaggtgatcctgtatgccgccttgcattagatgtgtattattatcgtatcgcgaaatatattggcgcatacgctgcggccatgaacggtgttgacgcgatcgtctttaccgcaggagttggcgaaaatagcccgattatgcgcgaagaaattattgagaactacttgggctacttagggatcaagatcgataaagaagccaatgacttcaaaggtgaggagaagatcatttcaacgcccgattccaaagtgattgcgatggtagttccgaccaacgaggagctcatgatcgccaaagacacgaaagaaatcattgagaaagggttggacgagcttaagatc

SEQ ID NO: 946 - protein, 417 aa, synthetic construct
  REGION 1..417: note = variant of acetate kinase from Marinitoga sp.38H-ov
MHHHHHHGGSGMKVLVINSGSSSIKYQLLDMTNEKVLAKGLVERIGIDGSRIVHKVNGEGHVLEHEIKNHEIGLKLVLDLLTDEKYGVLKDLKEIDAVGHRVVHGGERFASSVKITDEVLKTIETLSFLAPLHNPANIMGIKSSMKVLPGVPQVAVFDTAFHQKMPEKAYLYAIPYEYYEKYKIRRYGFHGTSHRYVSKRAAEIMGKPYDQLKIITVHVGNGASVAAVKNGVSVDTSMGFTPLEGLVMGTRSGDIDPAIVEFLEKEEGLSAKEVVNILNKKSGVYGLTKGFSSDMRLIVLKAIEGDPVCRLALDVYYYRIAKYIGAYAAAMNGVDAIVFTAGVGENSPIMREEIIENYLGYLGIKIDKEANDFKGEEKIISTPDSKVIAMVVPTNEELMIAKDTKEIIEKGLDELKI

SEQ ID NO: 947 - DNA, 1251 bp, synthetic construct
  misc_feature 1..1251: note = variant of acetate kinase from Marinitoga sp.38H-ov
  source 1..1251: mol_type = other DNA
atgcaccatcatcatcatcatggcggtagcggcatgaaagttctggtgattaattctggtagctcctccatcaaatatcagctcctcgatatgaccaacgaaaaggtattagcgaaaggcttggtcgagcgcattggcatcgacggttcgcgtatcgtgcataaagttaacggcgaagggcacgtgctggaacatgagattaaaaatcacgaaattggacttaaattggtcctggatcttcttacggacgaaaaatacggtgtgttgaaggatctcaaagaaatcgatgcagttgggcatcgcgtagtacatggcggcgagcgttttgccagtagcgtgaagattactgacgaagtcttaaagaccatcgagacgttgtcgttcttagctccgttacacaatccagcgaacattatgggtatcaagagcagcatgaaagtgttaccgggtgtgcctcaagttgccgtctttgatacagcgttccaccagaagatgccggagaaagcctatttgtacgcaatcccctatgagtactacgagaaatataaaattcgccgctatgggtttcatggaacctcacatcgttatgtgagtaaacgtgctgcggaaattatgggcaaaccgtacgatcagctcaagatcattaccgttcacgtgggtaacggcgcatcagttgcggcggtgaagaatggcgtatctgttgacacttccatgggtttcacaccacttgaaggtcttgtcatgggcacgcgcagcggcgatattgatccggccatcgtggaatttcttgagaaagaagaaggattgtcggccaaagaagtcgtcaacatcctcaacaagaaatctggtgtgtatgggctcaccaaaggcaatagtagtgacatgcgtgacattgtgctgaaggctattgaaggtgatcctgtatgccgccttgcattagatgtgtattattatcgtatcgcgaaatatattggcgcatacgctgcggccatgaacggtgttgacgcgatcgtctttaccgcaggagttggcgaaaatagcccgattatgcgcgaagaaattattgagaactacttgggctacttagggatcaagatcgataaagaagccaatgacttcaaaggtgaggagaagatcatttcaacgcccgattccaaagtgattgcgatggtagttccgaccaacgaggagctcatgatcgccaaagacacgaaagaaatcattgagaaagggttggacgagcttaagatc

SEQ ID NO: 948 - protein, 417 aa, synthetic construct
  REGION 1..417: note = variant of acetate kinase from Marinitoga sp.38H-ov
MHHHHHHGGSGMKVLVINSGSSSIKYQLLDMTNEKVLAKGLVERIGIDGSRIVHKVNGEGHVLEHEIKNHEIGLKLVLDLLTDEKYGVLKDLKEIDAVGHRVVHGGERFASSVKITDEVLKTIETLSFLAPLHNPANIMGIKSSMKVLPGVPQVAVFDTAFHQKMPEKAYLYAIPYEYYEKYKIRRYGFHGTSHRYVSKRAAEIMGKPYDQLKIITVHVGNGASVAAVKNGVSVDTSMGFTPLEGLVMGTRSGDIDPAIVEFLEKEEGLSAKEVVNILNKKSGVYGLTKGNSSDMRDIVLKAIEGDPVCRLALDVYYYRIAKYIGAYAAAMNGVDAIVFTAGVGENSPIMREEIIENYLGYLGIKIDKEANDFKGEEKIISTPDSKVIAMVVPTNEELMIAKDTKEIIEKGLDELKI

SEQ ID NO: 949 - DNA, 1251 bp, synthetic construct
  misc_feature 1..1251: note = variant of acetate kinase from Marinitoga sp.38H-ov
  source 1..1251: mol_type = other DNA
atgcaccatcatcatcatcatggcggtagcggcatgaaagttctggtgattaattctggtagctcctccatcaaatatcagctcctcgatatgaccaacgaaaaggtattagcgaaaggcttggtcgagcgcattggcatcgacggttcgcgtatcgtgcataaagttaacggcgaagggcacgtgctggaacatgagattaaaaatcacgaaattggacttaaattggtcctggatcttcttacggacgaaaaatacggtgtgttgaaggatctcaaagaaatcgatgcagttgggcatcgcgtagtacatggcggcgagcgttttgccagtagcgtgaagattactgacgaagtcttaaagaccatcgagacgttgtcgttcttagctccgttacacaatccagcgaacattatgggtatcaagagcagcatgaaagtgttaccgggtgtgcctcaagttgccgtctttgatacagcgttccaccagaagatgccggagaaagcctatttgtacgcaatcccctatgagtactacgagaaatataaaattcgccgctatgggtttcatggaacctcacatcgttatgtgagtaaacgtgctgcggaaattatgggcaaaccgtacgatcagctcaagatcattaccgttcacgtgggtaacggcgcatcagttgcggcggtgaagaatggcgtatctgttgacacttccatgggtttcacaccacttgaaggtcttgtcatgggcacgcgcagcggcgatattgatccggccatcgtggaatttcttgagaaagaagaaggattgtcggccaaagaagtcgtcaacatcctcaacaagaaatctggtgtgtatgggctcaccaaaggctttagtagtgacatgcgtgacattgtgcggaaggctattgaaggtgatcctgtatgccgccttgcattagatgtgtattattatcgtatcgcgaaatatattggcgcatacgctgcggccatgaacggtgttgacgcgatcgtctttaccgcaggagttggcgaaaatagcccgattatgcgcgaagaaattattgagaactacttgggctacttagggatcaagatcgataaagaagccaatgacttcaaaggtgaggagaagatcatttcaacgcccgattccaaagtgattgcgatggtagttccgaccaacgaggagctcatgatcgccaaagacacgaaagaaatcattgagaaagggttggacgagcttaagatc

SEQ ID NO: 950 - protein, 417 aa, synthetic construct
  REGION 1..417: note = variant of acetate kinase from Marinitoga sp.38H-ov
MHHHHHHGGSGMKVLVINSGSSSIKYQLLDMTNEKVLAKGLVERIGIDGSRIVHKVNGEGHVLEHEIKNHEIGLKLVLDLLTDEKYGVLKDLKEIDAVGHRVVHGGERFASSVKITDEVLKTIETLSFLAPLHNPANIMGIKSSMKVLPGVPQVAVFDTAFHQKMPEKAYLYAIPYEYYEKYKIRRYGFHGTSHRYVSKRAAEIMGKPYDQLKIITVHVGNGASVAAVKNGVSVDTSMGFTPLEGLVMGTRSGDIDPAIVEFLEKEEGLSAKEVVNILNKKSGVYGLTKGFSSDMRDIVRKAIEGDPVCRLALDVYYYRIAKYIGAYAAAMNGVDAIVFTAGVGENSPIMREEIIENYLGYLGIKIDKEANDFKGEEKIISTPDSKVIAMVVPTNEELMIAKDTKEIIEKGLDELKI

SEQ ID NO: 951 - DNA, 1251 bp, synthetic construct
  misc_feature 1..1251: note = variant of acetate kinase from Marinitoga sp.38H-ov
  source 1..1251: mol_type = other DNA
atgcaccatcatcatcatcatggcggtagcggcatgaaagttctggtgattaattctggtagctcctccatcaaatatcagctcctcgatatgaccaacgaaaaggtattagcgaaaggcttggtcgagcgcattggcatcgacggttcgcgtatcgtgcataaagttaacggcgaagggcacgtgctggaacatgagattaaaaatcacgaaattggacttaaattggtcctggatcttcttacggacgaaaaatacggtgtgttgaaggatctcaaagaaatcgatgcagttgggcatcgcgtagtacatggcggcgagcgttttgccagtagcgtgaagattactgacgaagtcttaaagaccatcgagacgttgtcgttcttagctccgttacacaatccagcgaacattatgggtatcaagagcagcatgaaagtgttaccgggtgtgcctcaagttgccgtctttgatacagcgttccaccagaagatgccggagaaagcctatttgtacgcaatcccctatgagtactacgagaaatataaaattcgccgctatgggtttcatggaacctcacatcgttatgtgagtaaacgtgctgcggaaattatgggcaaaccgtacgatcagctcaagatcattaccgttcacgtgggtaacggcgcatcagttgcggcggtgaagaatggcgtatctgttgacacttccatgggtttcacaccacttgaaggtcttgtcatgggcacgcgcagcggcgatattgatccggccatcgtggaatttcttgagaaagaagaaggattgtcggccaaagaagtcgtcaacatcctcaacaagaaatctggtgtgtatgggctcaccaaaggcggtagtagtgacatgcgtgacattgtgctgaaggctattgaaggtgatcctgtatgccgccttgcattagatgtgtattattatcgtatcgcgaaatatattggcgcatacgctgcggccatgaacggtgttgacgcgatcgtctttaccgcaggagttggcgaaaatagcccgattatgcgcgaagaaattattgagaactacttgggctacttagggatcaagatcgataaagaagccaatgacttcaaaggtgaggagaagatcatttcaacgcccgattccaaagtgattgcgatggtagttccgaccaacgaggagctcatgatcgccaaagacacgaaagaaatcattgagaaagggttggacgagcttaagatc

SEQ ID NO: 952 - protein, 417 aa, synthetic construct
  REGION 1..417: note = variant of acetate kinase from Marinitoga sp.38H-ov
MHHHHHHGGSGMKVLVINSGSSSIKYQLLDMTNEKVLAKGLVERIGIDGSRIVHKVNGEGHVLEHEIKNHEIGLKLVLDLLTDEKYGVLKDLKEIDAVGHRVVHGGERFASSVKITDEVLKTIETLSFLAPLHNPANIMGIKSSMKVLPGVPQVAVFDTAFHQKMPEKAYLYAIPYEYYEKYKIRRYGFHGTSHRYVSKRAAEIMGKPYDQLKIITVHVGNGASVAAVKNGVSVDTSMGFTPLEGLVMGTRSGDIDPAIVEFLEKEEGLSAKEVVNILNKKSGVYGLTKGGSSDMRDIVLKAIEGDPVCRLALDVYYYRIAKYIGAYAAAMNGVDAIVFTAGVGENSPIMREEIIENYLGYLGIKIDKEANDFKGEEKIISTPDSKVIAMVVPTNEELMIAKDTKEIIEKGLDELKI

SEQ ID NO: 953 - DNA, 1251 bp, synthetic construct
  misc_feature 1..1251: note = variant of acetate kinase from Marinitoga sp.38H-ov
  source 1..1251: mol_type = other DNA
atgcaccatcatcatcatcatggcggtagcggcatgaaagttctggtgattaattctggtagctcctccatcaaatatcagctcctcgatatgaccaacgaaaaggtattagcgaaaggcttggtcgagcgcattggcatcgacggttcgcgtatcgtgcataaagttaacggcgaagggcacgtgctggaacatgagattaaaaatcacgaaattggacttaaattggtcctggatcttcttacggacgaaaaatacggtgtgttgaaggatctcaaagaaatcgatgcagttgggcatcgcgtagtacatggcggcgagcgttttgccagtagcgtgaagattactgacgaagtcttaaagaccatcgagacgttgtcgttcttagctccgttacacaatccagcgaacattatgggtatcaagagcagcatgaaagtgttaccgggtgtgcctcaagttgccgtctttgatacagcgttccaccagaagatgccggagaaagcctatttgtacgcaatcccctatgagtactacgagaaatataaaattcgccgctatgggtttcatggaacctcacatcgttatgtgagtaaacgtgctgcggaaattatgggcaaaccgtacgatcagctcaagatcattaccgttcacgtgggtaacggcgcatcagttgcggcggtgaagaatggcgtatctgttgacacttccatgggtttcacaccacttgaaggtcttgtcatgggcacgcgcagcggcgatattgatccggccatcgtggaatttcttgagaaagaagaaggattgtcggccaaagaagtcgtcaacatcctctggaagaaatctggtgtgtatgggctcaccaaaggctttagtagtgacatgcgtgacattgtgctgaaggctattgaaggtgatcctgtatgccgccttgcattagatgtgtattattatcgtatcgcgaaatatattggcgcatacgctgcggccatgaacggtgttgacgcgatcgtctttaccgcaggagttggcgaaaatagcccgattatgcgcgaagaaattattgagaactacttgggctacttagggatcaagatcgataaagaagccaatgacttcaaaggtgaggagaagatcatttcaacgcccgattccaaagtgattgcgatggtagttccgaccaacgaggagctcatgatcgccaaagacacgaaagaaatcattgagaaagggttggacgagcttaagatc

SEQ ID NO: 954 - protein, 417 aa, synthetic construct
  REGION 1..417: note = variant of acetate kinase from Marinitoga sp.38H-ov
MHHHHHHGGSGMKVLVINSGSSSIKYQLLDMTNEKVLAKGLVERIGIDGSRIVHKVNGEGHVLEHEIKNHEIGLKLVLDLLTDEKYGVLKDLKEIDAVGHRVVHGGERFASSVKITDEVLKTIETLSFLAPLHNPANIMGIKSSMKVLPGVPQVAVFDTAFHQKMPEKAYLYAIPYEYYEKYKIRRYGFHGTSHRYVSKRAAEIMGKPYDQLKIITVHVGNGASVAAVKNGVSVDTSMGFTPLEGLVMGTRSGDIDPAIVEFLEKEEGLSAKEVVNILWKKSGVYGLTKGFSSDMRDIVLKAIEGDPVCRLALDVYYYRIAKYIGAYAAAMNGVDAIVFTAGVGENSPIMREEIIENYLGYLGIKIDKEANDFKGEEKIISTPDSKVIAMVVPTNEELMIAKDTKEIIEKGLDELKI

SEQ ID NO: 955 - DNA, 1251 bp, synthetic construct
  misc_feature 1..1251: note = variant of acetate kinase from Marinitoga sp.38H-ov
  source 1..1251: mol_type = other DNA
atgcaccatcatcatcatcatggcggtagcggcatgaaagttctggtgattaattctggtagctcctccatcaaatatcagctcctcgatatgaccaacgaaaaggtattagcgaaaggcttggtcgctcgcattggcatcgacggttcgcgtatcgtgcataaagttaacggcgaagggcacgtgctggaacatgagattaaaaatcacgaaattggacttaaattggtcctggatcttcttacggacgaaaaatacggtgtgttgaaggatctcaaagaaatcgatgcagttgggcatcgcgtagtacatggcggcgagcgttttgccagtagcgtgaagattactgacgaagtcttaaagaccatcgagacgttgtcgttcttagctccgttacacaatccagcgaacattatgggtatcaagagcagcatgaaagtgttaccgggtgtgcctcaagttgccgtctttgatacagcgttccaccagaagatgccggagaaagcctatttgtacgcaatcccctatgagtactacgagaaatataaaattcgccgctatgggtttcatggaacctcacatcgttatgtgagtaaacgtgctgcggaaattatgggcaaaccgtacgatcagctcaagatcattaccgttcacgtgggtaacggcgcatcagttgcggcggtgaagaatggcgtatctgttgacacttccatgggtttcacaccacttgaaggtcttgtcatgggcacgcgcagcggcgatattgatccggccatcgtggaatttcttgagaaagaagaaggattgtcggccaaagaagtcgtcaacatcctcaacaagaaatctggtgtgtatgggctcaccaaaggctttagtagtgacatgcgtgacattgtgctgaaggctattgaaggtgatcctgtatgccgccttgcattagatgtgtattattatcgtatcgcgaaatatattggcgcatacgctgcggccatgaacggtgttgacgcgatcgtctttaccgcaggagttggcgaaaatagcccgattatgcgcgaagaaattattgagaactacttgggctacttagggatcaagatcgataaagaagccaatgacttcaaaggtgaggagaagatcatttcaacgcccgattccaaagtgattgcgatggtagttccgaccaacgaggagctcatgatcgccaaagacacgaaagaaatcattgagaaagggttggacgagcttaagatc

SEQ ID NO: 956 - protein, 417 aa, synthetic construct
  REGION 1..417: note = variant of acetate kinase from Marinitoga sp.38H-ov
MHHHHHHGGSGMKVLVINSGSSSIKYQLLDMTNEKVLAKGLVARIGIDGSRIVHKVNGEGHVLEHEIKNHEIGLKLVLDLLTDEKYGVLKDLKEIDAVGHRVVHGGERFASSVKITDEVLKTIETLSFLAPLHNPANIMGIKSSMKVLPGVPQVAVFDTAFHQKMPEKAYLYAIPYEYYEKYKIRRYGFHGTSHRYVSKRAAEIMGKPYDQLKIITVHVGNGASVAAVKNGVSVDTSMGFTPLEGLVMGTRSGDIDPAIVEFLEKEEGLSAKEVVNILNKKSGVYGLTKGFSSDMRDIVLKAIEGDPVCRLALDVYYYRIAKYIGAYAAAMNGVDAIVFTAGVGENSPIMREEIIENYLGYLGIKIDKEANDFKGEEKIISTPDSKVIAMVVPTNEELMIAKDTKEIIEKGLDELKI

SEQ ID NO: 957 - DNA, 1251 bp, synthetic construct
  misc_feature 1..1251: note = variant of acetate kinase from Marinitoga sp.38H-ov
  source 1..1251: mol_type = other DNA
atgcaccatcatcatcatcatggcggtagcggcatgaaagttctggtgattaattctggtagctcctccatcaaatatcagctcctcgatatgaccaacgaaaaggtattagcgaaaggcttggtcgagcgcattggcatcgacggttcgcgtatcgtgcataaagttaacggcgaagggcacgtgctggaacatgagattaaaaatcacgaaattggacttaaattggtcctggatcttcttacggacgaaaaatacggtgtgttgaaggatctcaaagaaatcgatgcagttgggcatcgcgtagtacatggcggcgagcgttttgccagtagcgtgaagattactgacgaagtcttaaagaccatcgagacgttgtcgttcttagctccgttacacaatccagcgaacattatgggtatcaagagcagcatgaaagtgttaccgggtgtgcctcaagttgccgtctttgatacagcgttccaccagaagatgccggagaaagcctatttgtacgcaatcccctatgagtactacgagaaatataaaattcgccgctatgggtttcatggaacctcacatcgttatgtgagtaaacgtgctgcggaaattatgggcaaaccgtacgatcagctcaagatcattaccgttcacgtgggtaacggcgcatcaattgcggcggtgaagaatggcgtatctgttgacacttccatgggtttcacaccacttgaaggtcttgtcatgggcacgcgcagcggcgatattgatccggccatcgtggaatttcttgagaaagaagaaggattgtcggccaaagaagtcgtcaacatcctcaacaagaaatctggtgtgtatgggctcaccaaaggctttagtagtgacatgcgtgacattgtgctgaaggctattgaaggtgatcctgtatgccgccttgcattagatgtgtattattatcgtatcgcgaaatatattggcgcatacgctgcggccatgaacggtgttgacgcgatcgtctttaccgcaggagttggcgaaaatagcccgattatgcgcgaagaaattattgagaactacttgggctacttagggatcaagatcgataaagaagccaatgacttcaaaggtgaggagaagatcatttcaacgcccgattccaaagtgattgcgatggtagttccgaccaacgaggagctcatgatcgccaaagacacgaaagaaatcattgagaaagggttggacgagcttaagatc

SEQ ID NO: 958 - protein, 417 aa, synthetic construct
  REGION 1..417: note = variant of acetate kinase from Marinitoga sp.38H-ov
MHHHHHHGGSGMKVLVINSGSSSIKYQLLDMTNEKVLAKGLVERIGIDGSRIVHKVNGEGHVLEHEIKNHEIGLKLVLDLLTDEKYGVLKDLKEIDAVGHRVVHGGERFASSVKITDEVLKTIETLSFLAPLHNPANIMGIKSSMKVLPGVPQVAVFDTAFHQKMPEKAYLYAIPYEYYEKYKIRRYGFHGTSHRYVSKRAAEIMGKPYDQLKIITVHVGNGASIAAVKNGVSVDTSMGFTPLEGLVMGTRSGDIDPAIVEFLEKEEGLSAKEVVNILNKKSGVYGLTKGFSSDMRDIVLKAIEGDPVCRLALDVYYYRIAKYIGAYAAAMNGVDAIVFTAGVGENSPIMREEIIENYLGYLGIKIDKEANDFKGEEKIISTPDSKVIAMVVPTNEELMIAKDTKEIIEKGLDELKI

SEQ ID NO: 959 - DNA, 1251 bp, synthetic construct
  misc_feature 1..1251: note = variant of acetate kinase from Marinitoga sp.38H-ov
  source 1..1251: mol_type = other DNA
atgcaccatcatcatcatcatggcggtagcggcatgaaagttctggtgattaattctggtagctcctccatcaaatatcagctcctcgatatgaccaacgaaaaggtattagcgaaaggcttggtcgagcgcattggcatcgacggttcgcgtatcgtgcataaagttaacggcgaagggcacgtgctggaacatgagattaaaaatcacgaaattggacttaaattggtcctggatcttcttacggacgaaaaatacggtgtgttgaaggatctcaaagaaatcgatgcagttgggcatcgcgtagtacatggcggcgagcgttttgccagtagcgtgaagattactgacgaagtcttaaagaccatcgagacgttgtcgttcttagctccgttacacaatccagcgaacattatgggtatcaagagcagcatgaaagtgttaccgggtgtgcctcaagttgccgtctttgatacagcgttccaccagaagatgccggagaaagcctatttgtacgcaatcccctatgagtactacgagaaatataaaattcgccgctatgggtttcatggaacctcacatcgttatgtgagtaaacgtgctgcggaaattatgggcaaaccgtacgatcagctcaagatcattggggttcacgtgggtaacggcgcatcagttgcggcggtgaagaatggcgtatctgttgacacttccatgggtttcacaccacttgaaggtcttgtcatgggcacgcgcagcggcgatattgatccggccatcgtggaatttcttgagaaagaagaaggattgtcggccaaagaagtcgtcaacatcctcaacaagaaatctggtgtgtatgggctcaccaaaggctttagtagtgacatgcgtgacattgtgctgaaggctattgaaggtgatcctgtatgccgccttgcattagatgtgtattattatcgtatcgcgaaatatattggcgcatacgctgcggccatgaacggtgttgacgcgatcgtctttaccgcaggagttggcgaaaatagcccgattatgcgcgaagaaattattgagaactacttgggctacttagggatcaagatcgataaagaagccaatgacttcaaaggtgaggagaagatcatttcaacgcccgattccaaagtgattgcgatggtagttccgaccaacgaggagctcatgatcgccaaagacacgaaagaaatcattgagaaagggttggacgagcttaagatc

SEQ ID NO: 960 - protein, 417 aa, synthetic construct
  REGION 1..417: note = variant of acetate kinase from Marinitoga sp.38H-ov
MHHHHHHGGSGMKVLVINSGSSSIKYQLLDMTNEKVLAKGLVERIGIDGSRIVHKVNGEGHVLEHEIKNHEIGLKLVLDLLTDEKYGVLKDLKEIDAVGHRVVHGGERFASSVKITDEVLKTIETLSFLAPLHNPANIMGIKSSMKVLPGVPQVAVFDTAFHQKMPEKAYLYAIPYEYYEKYKIRRYGFHGTSHRYVSKRAAEIMGKPYDQLKIIGVHVGNGASVAAVKNGVSVDTSMGFTPLEGLVMGTRSGDIDPAIVEFLEKEEGLSAKEVVNILNKKSGVYGLTKGFSSDMRDIVLKAIEGDPVCRLALDVYYYRIAKYIGAYAAAMNGVDAIVFTAGVGENSPIMREEIIENYLGYLGIKIDKEANDFKGEEKIISTPDSKVIAMVVPTNEELMIAKDTKEIIEKGLDELKI

SEQ ID NO: 961 - DNA, 1251 bp, synthetic construct
  misc_feature 1..1251: note = variant of acetate kinase from Marinitoga sp.38H-ov
  source 1..1251: mol_type = other DNA
atgcaccatcatcatcatcatggcggtagcggcatgaaagttctggtgattaattctggtagctcctccatcaaatatcagctcctcgatatgaccaacgaaaaggtattagcgaaaggcttggtcgagcgcattggcatcgacggttcgcgtatcgtgcataaagttaacggcgaagggcacgtgctggaacatgagattaaaaatcacgaaattggacttaaattggtcctggatcttcttacggacgaaaaatacggtgtgttgaaggatctcaaagaaatcgatgcagttgggcatcgcgtagtacatggcggcgagcgttttgccagtagcgtgaagattactgacgaagtcttaaagaccatcgagacgttgtcgttcttagctccgttacacaatccagcgaacattatgggtatcaagagcagcatgaaagtgttaccgggtgtgcctcaagttgccgtctttgatacagcgttccaccagaagatgccggagaaagcctatttgtacgcaatcccctatgagtactacgagaaatataaaattcgccgctatgggtttcatggaacctcacatcgttatgtgagtaaacgtgctgcggaaattatgggcaaaccgtacgatcagctcaagatcattaccgttcacgtgggtaacggcgcatcagttgcggcggtgaagaatggcgtatctgttgacacttccatgggtttcacaccacttgaaggtcttgtcatgggcacgcgcagcggcgatattgatccggccatcgtggaatttcttgagaaagaagaaggattgtcggccaaagaagtcgtcaacatcctcaacaagaaatctggtgtgtatgggctcaccaaaggctttagtagtgacatgcgtgacattgtgctgaaggctattgaaggtgatcctgtatgccgccttgcattagatgtgtattattatcgtatcgcgaaatatattggcgcatacgctgcggccatgaacggtgttgacgcgatcgtctttaccgcaggagttggcgaaaatagcccgattatgcgcatggaaattattgagaactacttgggctacttagggatcaagatcgataaagaagccaatgacttcaaaggtgaggagaagatcatttcaacgcccgattccaaagtgattgcgatggtagttccgaccaacgaggagctcatgatcgccaaagacacgaaagaaatcattgagaaagggttggacgagcttaagatc

SEQ ID NO: 962 - protein, 417 aa, synthetic construct
  REGION 1..417: note = variant of acetate kinase from Marinitoga sp.38H-ov
MHHHHHHGGSGMKVLVINSGSSSIKYQLLDMTNEKVLAKGLVERIGIDGSRIVHKVNGEGHVLEHEIKNHEIGLKLVLDLLTDEKYGVLKDLKEIDAVGHRVVHGGERFASSVKITDEVLKTIETLSFLAPLHNPANIMGIKSSMKVLPGVPQVAVFDTAFHQKMPEKAYLYAIPYEYYEKYKIRRYGFHGTSHRYVSKRAAEIMGKPYDQLKIITVHVGNGASVAAVKNGVSVDTSMGFTPLEGLVMGTRSGDIDPAIVEFLEKEEGLSAKEVVNILNKKSGVYGLTKGFSSDMRDIVLKAIEGDPVCRLALDVYYYRIAKYIGAYAAAMNGVDAIVFTAGVGENSPIMRMEIIENYLGYLGIKIDKEANDFKGEEKIISTPDSKVIAMVVPTNEELMIAKDTKEIIEKGLDELKI

SEQ ID NO: 963 - DNA, 1251 bp, synthetic construct
  misc_feature 1..1251: note = variant of acetate kinase from Marinitoga sp.38H-ov
  source 1..1251: mol_type = other DNA
atgcaccatcatcatcatcatggcggtagcggcatgaaagttctggtgattaattctggtagctcctccatcaaatatcagctcctcgatatgaccaacgaaaaggtattagcgaaaggcttggtcgagcgcattggcatcgacggttcgcgtatcgtgcataaagttaacggcgaagggcacgtgctggaacatgagattaaaaatcacgaaattggacttaaattggtcctggatcttcttacggacgaaaaatacggtgtgttgaaggatctcaaagaaatcgatgcagttgggcatcgcgtagtacatggcggcgagcgttttgccagtagcgtgaagattactgacgaagtcttaaagaccatcgagacgttgtcgttcttagctccgttacacaatccagcgaacattatgggtatcaagagcagcatgaaagtgttaccgggtgtgcctcaagttgccgtctttgatacagcgttccaccagaagatgccggagaaagcctatttgtacgcaatcccctatgagtactacgagaaatataaaattcgccgctatgggtttcatggaacctcacatcgttatgtgagtaaacgtgctgcggaaattatgggcaaaccgtacgatcagctcaagatcattaccgttcacgtgggtaacggcgcatcagttgcggcggtgaagaatggcgtatctgttgacacttccatgggtttcacaccacttgaaggtcttgtcatgggcacgcgcagcggcgatattgatccggccatcgtggaatttcttgagaaagaagaaggattgtcggccaaagaagtcgtcaacatcctcaacaagaaatctggtgtgtatgggctcaccaaaggctttagtagtgacatgcgtgacattgtgctgaagtgtattgaaggtgatcctgtatgccgccttgcattagatgtgtattattatcgtatcgcgaaatatattggcgcatacgctgcggccatgaacggtgttgacgcgatcgtctttaccgcaggagttggcgaaaatagcccgattatgcgcgaagaaattattgagaactacttgggctacttagggatcaagatcgataaagaagccaatgacttcaaaggtgaggagaagatcatttcaacgcccgattccaaagtgattgcgatggtagttccgaccaacgaggagctcatgatcgccaaagacacgaaagaaatcattgagaaagggttggacgagcttaagatc

SEQ ID NO: 964 - protein, 417 aa, synthetic construct
  REGION 1..417: note = variant of acetate kinase from Marinitoga sp.38H-ov
MHHHHHHGGSGMKVLVINSGSSSIKYQLLDMTNEKVLAKGLVERIGIDGSRIVHKVNGEGHVLEHEIKNHEIGLKLVLDLLTDEKYGVLKDLKEIDAVGHRVVHGGERFASSVKITDEVLKTIETLSFLAPLHNPANIMGIKSSMKVLPGVPQVAVFDTAFHQKMPEKAYLYAIPYEYYEKYKIRRYGFHGTSHRYVSKRAAEIMGKPYDQLKIITVHVGNGASVAAVKNGVSVDTSMGFTPLEGLVMGTRSGDIDPAIVEFLEKEEGLSAKEVVNILNKKSGVYGLTKGFSSDMRDIVLKCIEGDPVCRLALDVYYYRIAKYIGAYAAAMNGVDAIVFTAGVGENSPIMREEIIENYLGYLGIKIDKEANDFKGEEKIISTPDSKVIAMVVPTNEELMIAKDTKEIIEKGLDELKI

SEQ ID NO: 965 - DNA, 1251 bp, synthetic construct
  misc_feature 1..1251: note = variant of acetate kinase from Marinitoga sp.38H-ov
  source 1..1251: mol_type = other DNA
atgcaccatcatcatcatcatggcggtagcggcatgaaagttctggtgattaattctggtagctcctccatcaaatatcagctcctcgatatgaccaacgaaaaggtattagcgaaaggcttggtcgagcgcattggcatcgacggttcgcgtatcgtgcataaagttaacggcgaagggcacgtgctggaacatgagattaaaaatcacgaaattggacttaaattggtcctggatcttcttacggacgaaaaatacggtgtgttgaaggatctcaaagaaatcgatgcagttgggcatcgcgtagtacatggcggcgagcgttttgccagtagcgtgaagattactgacgaagtcttaaagaccatcgagacgttgtcgttcttagctccgttacacaatccagcgaacattatgggtatcaagagcagcatgaaagtgttaccgggtgtgcctcaagttgccgtctttgatacagcgttccaccagaagatgccggagaaagcctatttgtacgcaatcccctatgagtactacgagaaatataaaattcgccgctatgggtttcatggaacctcacatcgttatgtgagtaaacgtgctgcggaaattatgggcaaaccgtacgatcagctcaagatcattaccgttcacgtgggtaacggcgcatcagttgcggcggtgaagaatggcgtatctgttgacacttccatgggtttcacaccacttgaaggtcttgtcatgggcacgcgcagcggcgatattgatccggccatcgtggaatttcttgagaaagaagaaggattgtcggccaaagaagtcgtcaacatcctcaacaagaaatctggtgtgtatgggctcaccaaaggctttagtagtgacatgcgtgacattgtgctgaaggctattgaaggtgatcctgtaaggcgccttgcattagatgtgtattattatcgtatcgcgaaatatattggcgcatacgctgcggccatgaacggtgttgacgcgatcgtctttaccgcaggagttggcgaaaatagcccgattatgcgcgaagaaattattgagaactacttgggctacttagggatcaagatcgataaagaagccaatgacttcaaaggtgaggagaagatcatttcaacgcccgattccaaagtgattgcgatggtagttccgaccaacgaggagctcatgatcgccaaagacacgaaagaaatcattgagaaagggttggacgagcttaagatc

SEQ ID NO: 966 - protein, 417 aa, synthetic construct
  REGION 1..417: note = variant of acetate kinase from Marinitoga sp.38H-ov
MHHHHHHGGSGMKVLVINSGSSSIKYQLLDMTNEKVLAKGLVERIGIDGSRIVHKVNGEGHVLEHEIKNHEIGLKLVLDLLTDEKYGVLKDLKEIDAVGHRVVHGGERFASSVKITDEVLKTIETLSFLAPLHNPANIMGIKSSMKVLPGVPQVAVFDTAFHQKMPEKAYLYAIPYEYYEKYKIRRYGFHGTSHRYVSKRAAEIMGKPYDQLKIITVHVGNGASVAAVKNGVSVDTSMGFTPLEGLVMGTRSGDIDPAIVEFLEKEEGLSAKEVVNILNKKSGVYGLTKGFSSDMRDIVLKAIEGDPVRRLALDVYYYRIAKYIGAYAAAMNGVDAIVFTAGVGENSPIMREEIIENYLGYLGIKIDKEANDFKGEEKIISTPDSKVIAMVVPTNEELMIAKDTKEIIEKGLDELKI

SEQ ID NO: 967 - DNA, 1251 bp, synthetic construct
  misc_feature 1..1251: note = variant of acetate kinase from Marinitoga sp.38H-ov
  source 1..1251: mol_type = other DNA
atgcaccatcatcatcatcatggcggtagcggcatgaaagttctggtgattaattctggtagccggtccatcaaatatcagctcctcgatatgaccaacgaaaaggtattagcgaaaggcttggtcgagcgcattggcatcgacggttcgcgtatcgtgcataaagttaacggcgaagggcacgtgctggaacatgagattaaaaatcacgaaattggacttaaattggtcctggatcttcttacggacgaaaaatacggtgtgttgaaggatctcaaagaaatcgatgcagttgggcatcgcgtagtacatggcggcgagcgttttgccagtagcgtgaagattactgacgaagtcttaaagaccatcgagacgttgtcgttcttagctccgttacacaatccagcgaacattatgggtatcaagagcagcatgaaagtgttaccgggtgtgcctcaagttgccgtctttgatacagcgttccaccagaagatgccggagaaagcctatttgtacgcaatcccctatgagtactacgagaaatataaaattcgccgctatgggtttcatggaacctcacatcgttatgtgagtaaacgtgctgcggaaattatgggcaaaccgtacgatcagctcaagatcattaccgttcacgtgggtaacggcgcatcagttgcggcggtgaagaatggcgtatctgttgacacttccatgggtttcacaccacttgaaggtcttgtcatgggcacgcgcagcggcgatattgatccggccatcgtggaatttcttgagaaagaagaaggattgtcggccaaagaagtcgtcaacatcctcaacaagaaatctggtgtgtatgggctcaccaaaggctttagtagtgacatgcgtgacattgtgctgaaggctattgaaggtgatcctgtatgccgccttgcattagatgtgtattattatcgtatcgcgaaatatattggcgcatacgctgcggccatgaacggtgttgacgcgatcgtctttaccgcaggagttggcgaaaatagcccgattatgcgcgaagaaattattgagaactacttgggctacttagggatcaagatcgataaagaagccaatgacttcaaaggtgaggagaagatcatttcaacgcccgattccaaagtgattgcgatggtagttccgaccaacgaggagctcatgatcgccaaagacacgaaagaaatcattgagaaagggttggacgagcttaagatc

SEQ ID NO: 968 - protein, 417 aa, synthetic construct
  REGION 1..417: note = variant of acetate kinase from Marinitoga sp.38H-ov
MHHHHHHGGSGMKVLVINSGSRSIKYQLLDMTNEKVLAKGLVERIGIDGSRIVHKVNGEGHVLEHEIKNHEIGLKLVLDLLTDEKYGVLKDLKEIDAVGHRVVHGGERFASSVKITDEVLKTIETLSFLAPLHNPANIMGIKSSMKVLPGVPQVAVFDTAFHQKMPEKAYLYAIPYEYYEKYKIRRYGFHGTSHRYVSKRAAEIMGKPYDQLKIITVHVGNGASVAAVKNGVSVDTSMGFTPLEGLVMGTRSGDIDPAIVEFLEKEEGLSAKEVVNILNKKSGVYGLTKGFSSDMRDIVLKAIEGDPVCRLALDVYYYRIAKYIGAYAAAMNGVDAIVFTAGVGENSPIMREEIIENYLGYLGIKIDKEANDFKGEEKIISTPDSKVIAMVVPTNEELMIAKDTKEIIEKGLDELKI

SEQ ID NO: 969 - DNA, 1251 bp, synthetic construct
  misc_feature 1..1251: note = variant of acetate kinase from Marinitoga sp.38H-ov
  source 1..1251: mol_type = other DNA
atgcaccatcatcatcatcatggcggtagcggcatgaaagttctggtgattaattctggtagctcctccatcaaatatcagctcctcgatatgaccaacgaaaaggtattagcgaaaggcttggtcgagcgcattggcatcgacggttcgcgtatcgtgcataaagttaacggcgaagggcacgtgctggaacatgagattaaaaatcacgaaattggacttaaattggtcctggatcttcttacggacgaaaaatacggtgtgttgaaggatctcaaagaaatcgatgcagttgggcatcgcgtagtacatggcggcgagcgttttgccagtagcgtgaagattactgacgaagtcttaaagaccatcgagacgttgtcgttcttagctccgttacacaatccagcgaacattatgggtatcaagagcagcatgaaagtgttaccgggtgtgcctcaagttgccgtctttgatacagcgttccaccagaagatgccggagaaagcctatttgtacgcaatcccctatgagtactacgagaaatataaaattcgccgctatgggtttcatggaacctcacatcgttatgtgagtaaacgtgctgcggaaattatgggcaaaccgtacgatcagctcaagatcattaccgttcacgtgggtaacggcgcatcagttgcggcggtgaagaatggcgtatctgttgacacttccatgggtttcacaccacttgaaggtcttgtcatgggcacgcgcagcggcgatattgatccggccatcgtggaatttcttgagaaagaagaaggattgtcggccaaagaagtcgtcaacatcctcaacaagaaatctggtgtgtatgggctcaccaaaggctttgcgagtgacatgcgtgacattgtgctgaaggctattgaaggtgatcctgtatgccgccttgcattagatgtgtattattatcgtatcgcgaaatatattggcgcatacgctgcggccatgaacggtgttgacgcgatcgtctttaccgcaggagttggcgaaaatagcccgattatgcgcgaagaaattattgagaactacttgggctacttagggatcaagatcgataaagaagccaatgacttcaaaggtgaggagaagatcatttcaacgcccgattccaaagtgattgcgatggtagttccgaccaacgaggagctcatgatcgccaaagacacgaaagaaatcattgagaaagggttggacgagcttaagatc

SEQ ID NO: 970 - protein, 417 aa, synthetic construct
  REGION 1..417: note = variant of acetate kinase from Marinitoga sp.38H-ov
MHHHHHHGGSGMKVLVINSGSSSIKYQLLDMTNEKVLAKGLVERIGIDGSRIVHKVNGEGHVLEHEIKNHEIGLKLVLDLLTDEKYGVLKDLKEIDAVGHRVVHGGERFASSVKITDEVLKTIETLSFLAPLHNPANIMGIKSSMKVLPGVPQVAVFDTAFHQKMPEKAYLYAIPYEYYEKYKIRRYGFHGTSHRYVSKRAAEIMGKPYDQLKIITVHVGNGASVAAVKNGVSVDTSMGFTPLEGLVMGTRSGDIDPAIVEFLEKEEGLSAKEVVNILNKKSGVYGLTKGFASDMRDIVLKAIEGDPVCRLALDVYYYRIAKYIGAYAAAMNGVDAIVFTAGVGENSPIMREEIIENYLGYLGIKIDKEANDFKGEEKIISTPDSKVIAMVVPTNEELMIAKDTKEIIEKGLDELKI

SEQ ID NO: 971 - DNA, 1251 bp, synthetic construct
  misc_feature 1..1251: note = variant of acetate kinase from Marinitoga sp.38H-ov
  source 1..1251: mol_type = other DNA
atgcaccatcatcatcatcatggcggtagcggcatgaaagttctggtgattaattctggtagctcctccatcaaatatcagctcctcgatatgaccaacgaaaaggtattagcgaaaggcttggtcgagcgcattggcatcgacggttcgcgtatcgtgcataaagttaacggcgaagggcacgtgctggaacatgagattaaaaatcacgaaattggacttaaattggtcctggatcttcttacggacgaaaaatacggtgtgttgaaggatctcaaagaaatcgatgcagttgggcatcgcgtagtacatggcggcgagcgttttgccagtagcgtgaagattactgacgaagtcttaaagaccatcgagacgttgtcgttcttagctccgttacacaatccagcgaacattatgggtatcaagagcagcatgaaagtgttaccgggtgtgcctcaagttgccgtctttgatacagcgttccaccagaagatgccggagaaagcctatttgtacgcaatcccctatgagtactacgagaaatataaaattcgccgctatgggtttcatggaacctcacatcgttatgtgagtaaacgtgctgcggaaattatgggcaaaccgtacgatcagctcaagatcattaccgttcacgtgggtaacggcgcatcagttgcggcggtgaagaatggcgtatctgttgacacttccatgggtttcacaccacttgaaggtcttgtcatgggcacgcgcagcggcgatattgatccggccatcgtggaatttcttgagaaagaagaaggattgtcggccaaagaagtcgtcaacatcctcaacaagaaatctggtgtgtatgggctcaccaaaggctggagtagtgacatgcgtgacattgtgctgaaggctattgaaggtgatcctgtatgccgccttgcattagatgtgtattattatcgtatcgcgaaatatattggcgcatacgctgcggccatgaacggtgttgacgcgatcgtctttaccgcaggagttggcgaaaatagcccgattatgcgcgaagaaattattgagaactacttgggctacttagggatcaagatcgataaagaagccaatgacttcaaaggtgaggagaagatcatttcaacgcccgattccaaagtgattgcgatggtagttccgaccaacgaggagctcatgatcgccaaagacacgaaagaaatcattgagaaagggttggacgagcttaagatc

SEQ ID NO: 972 - protein, 417 aa, synthetic construct
  REGION 1..417: note = variant of acetate kinase from Marinitoga sp.38H-ov
MHHHHHHGGSGMKVLVINSGSSSIKYQLLDMTNEKVLAKGLVERIGIDGSRIVHKVNGEGHVLEHEIKNHEIGLKLVLDLLTDEKYGVLKDLKEIDAVGHRVVHGGERFASSVKITDEVLKTIETLSFLAPLHNPANIMGIKSSMKVLPGVPQVAVFDTAFHQKMPEKAYLYAIPYEYYEKYKIRRYGFHGTSHRYVSKRAAEIMGKPYDQLKIITVHVGNGASVAAVKNGVSVDTSMGFTPLEGLVMGTRSGDIDPAIVEFLEKEEGLSAKEVVNILNKKSGVYGLTKGWSSDMRDIVLKAIEGDPVCRLALDVYYYRIAKYIGAYAAAMNGVDAIVFTAGVGENSPIMREEIIENYLGYLGIKIDKEANDFKGEEKIISTPDSKVIAMVVPTNEELMIAKDTKEIIEKGLDELKI

SEQ ID NO: 973 - DNA, 1251 bp, synthetic construct
  misc_feature 1..1251: note = variant of acetate kinase from Marinitoga sp.38H-ov
  source 1..1251: mol_type = other DNA
atgcaccatcatcatcatcatggcggtagcggcatgaaagttctggtgattaattctggtagctcctccatcaaatatcagctcctcgatatgaccaacgaaaaggtattagcgaaaggcttggtcgagcgcattggcatcgacggttcgcgtatcgtgcataaagttaacggcgaagggcacgtgctggaacatgagattaaaaatcacgaaattggacttaaattggtcctggatcttcttacggacgaaaaatacggtgtgttgaaggatctcaaagaaatcgatgcagttgggcatcgcgtagtacatggcggcgagcgttttgccagtagcgtgaagattactgacgaagtcttaaagaccatcgagacgttgtcgttcttagctccgttacacaatccagcgaacattatgggtatcaagagcagcatgaaagtgttaccgggtgtgcctcaagttgccgtctttgatacagcgttccaccagaagatgccggagaaagcctatttgtacgcaatcccctatgagtactacgagaaatataaaattcgccgctatgggtttcatggaacctcacatcgttatgtgagtaaacgtgctgcggaaattatgggcaaaccgtacgatcagctcaagatcattaccgttcacgtgggtaacggcgcatcagttgcggcggtgaagaatggcgtatctgttgacacttccatgggtttcacaccacttgaaggtcttgtcatgggcacgcgcagcggcgatattgatccggccatcgtggaatttcttgagaaagaagaaggattgtcggccaaagaagtcgtcaacatcctcaacaagaaatctggtgtgtatgggctcaccaaaggctttagtagtgacatgcgtgacattgtgctgaaggctattgaaggtgatcctgtatgccgccttgcattagatgtgtattattatcgtatcgcgaaatatattggcgcatacgctgcggccatgaacggtgttgacgcgatcgtctttaccgcaggagttggcgaaaatagcccgattatgcgcgaaattattattgagaactacttgggctacttagggatcaagatcgataaagaagccaatgacttcaaaggtgaggagaagatcatttcaacgcccgattccaaagtgattgcgatggtagttccgaccaacgaggagctcatgatcgccaaagacacgaaagaaatcattgagaaagggttggacgagcttaagatc

SEQ ID NO: 974 - protein, 417 aa, synthetic construct
  REGION 1..417: note = variant of acetate kinase from Marinitoga sp.38H-ov
MHHHHHHGGSGMKVLVINSGSSSIKYQLLDMTNEKVLAKGLVERIGIDGSRIVHKVNGEGHVLEHEIKNHEIGLKLVLDLLTDEKYGVLKDLKEIDAVGHRVVHGGERFASSVKITDEVLKTIETLSFLAPLHNPANIMGIKSSMKVLPGVPQVAVFDTAFHQKMPEKAYLYAIPYEYYEKYKIRRYGFHGTSHRYVSKRAAEIMGKPYDQLKIITVHVGNGASVAAVKNGVSVDTSMGFTPLEGLVMGTRSGDIDPAIVEFLEKEEGLSAKEVVNILNKKSGVYGLTKGFSSDMRDIVLKAIEGDPVCRLALDVYYYRIAKYIGAYAAAMNGVDAIVFTAGVGENSPIMREIIIENYLGYLGIKIDKEANDFKGEEKIISTPDSKVIAMVVPTNEELMIAKDTKEIIEKGLDELKI

SEQ ID NO: 975 - DNA, 1251 bp, synthetic construct
  misc_feature 1..1251: note = variant of acetate kinase from Marinitoga sp.38H-ov
  source 1..1251: mol_type = other DNA
atgcaccatcatcatcatcatggcggtagcggcatgaaagttctggtgattaattctggtagctcctccatcaaatatcagctcctcgatatgaccaacgaaaaggtattagcgaaaggcttggtcgagcgcattggcatcgacggttcgcgtatcgtgcataaagttaacggcgaagggcacgtgctggaacatgagattaaaaatcacgaaattggacttaaattggtcctggatcttcttacggacgaaaaatacggtgtgttgaaggatctcaaagaaatcgatgcagttgggcatcgcgtagtacatggcggcgagcgttttgccagtagcgtgaagattactgacgaagtcttaaagaccatcgagacgttgtcgttcttagctccgttacacaatccagcgaacattatgggtatcaagagcagcatgaaagtgttaccgggtgtgcctcaagttgccgtctttgatacagcgttccaccagaagatgccggagaaagcctatttgtacgcaatcccctatgagtactacgagaaatataaaattcgccgctatgggatgcatggaacctcacatcgttatgtgagtaaacgtgctgcggaaattatgggcaaaccgtacgatcagctcaagatcattaccgttcacgtgggtaacggcgcatcagttgcggcggtgaagaatggcgtatctgttgacacttccatgggtttcacaccacttgaaggtcttgtcatgggcacgcgcagcggcgatattgatccggccatcgtggaatttcttgagaaagaagaaggattgtcggccaaagaagtcgtcaacatcctcaacaagaaatctggtgtgtatgggctcaccaaaggctttagtagtgacatgcgtgacattgtgctgaaggctattgaaggtgatcctgtatgccgccttgcattagatgtgtattattatcgtatcgcgaaatatattggcgcatacgctgcggccatgaacggtgttgacgcgatcgtctttaccgcaggagttggcgaaaatagcccgattatgcgcgaagaaattattgagaactacttgggctacttagggatcaagatcgataaagaagccaatgacttcaaaggtgaggagaagatcatttcaacgcccgattccaaagtgattgcgatggtagttccgaccaacgaggagctcatgatcgccaaagacacgaaagaaatcattgagaaagggttggacgagcttaagatc

SEQ ID NO: 976 - protein, 417 aa, synthetic construct
  REGION 1..417: note = variant of acetate kinase from Marinitoga sp.38H-ov
MHHHHHHGGSGMKVLVINSGSSSIKYQLLDMTNEKVLAKGLVERIGIDGSRIVHKVNGEGHVLEHEIKNHEIGLKLVLDLLTDEKYGVLKDLKEIDAVGHRVVHGGERFASSVKITDEVLKTIETLSFLAPLHNPANIMGIKSSMKVLPGVPQVAVFDTAFHQKMPEKAYLYAIPYEYYEKYKIRRYGMHGTSHRYVSKRAAEIMGKPYDQLKIITVHVGNGASVAAVKNGVSVDTSMGFTPLEGLVMGTRSGDIDPAIVEFLEKEEGLSAKEVVNILNKKSGVYGLTKGFSSDMRDIVLKAIEGDPVCRLALDVYYYRIAKYIGAYAAAMNGVDAIVFTAGVGENSPIMREEIIENYLGYLGIKIDKEANDFKGEEKIISTPDSKVIAMVVPTNEELMIAKDTKEIIEKGLDELKI

SEQ ID NO: 977 - DNA, 1251 bp, synthetic construct
  misc_feature 1..1251: note = variant of acetate kinase from Marinitoga sp.38H-ov
  source 1..1251: mol_type = other DNA
atgcaccatcatcatcatcatggcggtagcggcatgaaagttctggtgattaattctggtagctcctccatcaaatatcagctcctcgatatgaccaacgaaaaggtattagcgaaaggcttggtcgagcgcattggcatcgacggttcgcgtatcgtgcataaagttaacggcgaagggcacgtgctggaacatgagattaaaaatcacgaaattggacttaaattggtcctggatcttcttacggacgaaaaatacggtgtgttgaaggatctcaaagaaatcgatgcagttgggcatcgcgtagtacatggcggcgagcgttttgccagtagcgtgaagattactgacgaagtcttaaagaccatcgagacgttgtcgttcttagctccgttacacaatccagcgaacattatgggtatcaagagcagcatgaaagtgttaccgggtgtgcctcaagttgccgtctttgatacagcgttccaccagaagatgccggagaaagcctatttgtacgcaatcccctatgagtactacgagaaatataaaattcgccgctatgggtttcatggaacctcacatcgttatgtgagtaaacgtgctgcggaaattatgggcaaaccgtacgatcagctcaagatcattaccgttcacgtgggtaacggcgcatcagttgcggcggtgaagaatggcgtatctgttgacacttccatgggtttcacaccacttgaaggtcttgtcatgggcacgcgcagcggcgatattgatccggccatcgtggaatttcttgagaaagaagaaggattgtcggccaaagaagtcgtcaacatcctcaacaagaaatctggtgtgtatgggctcaccaaaggctttagtagtgacatgcgtgacattgtgctgaaggctattgaaggtgatcctgtatgccgccttgcattagatgtgtattattatcgtatcgcgaaatatattggcgcatacgctgcggccatgaacggtgttgacgcgatcgtctttaccgcaggagttggcgaaaatagcccgattatgcgcgaagaaattattgagaactacttgggctacttagggatcaagatcgataaagaagccaatgacttcaaatatgaggagaagatcatttcaacgcccgattccaaagtgattgcgatggtagttccgaccaacgaggagctcatgatcgccaaagacacgaaagaaatcattgagaaagggttggacgagcttaagatc

SEQ ID NO: 978 - protein, 417 aa, synthetic construct
  REGION 1..417: note = variant of acetate kinase from Marinitoga sp.38H-ov
MHHHHHHGGSGMKVLVINSGSSSIKYQLLDMTNEKVLAKGLVERIGIDGSRIVHKVNGEGHVLEHEIKNHEIGLKLVLDLLTDEKYGVLKDLKEIDAVGHRVVHGGERFASSVKITDEVLKTIETLSFLAPLHNPANIMGIKSSMKVLPGVPQVAVFDTAFHQKMPEKAYLYAIPYEYYEKYKIRRYGFHGTSHRYVSKRAAEIMGKPYDQLKIITVHVGNGASVAAVKNGVSVDTSMGFTPLEGLVMGTRSGDIDPAIVEFLEKEEGLSAKEVVNILNKKSGVYGLTKGFSSDMRDIVLKAIEGDPVCRLALDVYYYRIAKYIGAYAAAMNGVDAIVFTAGVGENSPIMREEIIENYLGYLGIKIDKEANDFKYEEKIISTPDSKVIAMVVPTNEELMIAKDTKEIIEKGLDELKI

SEQ ID NO: 979 - DNA, 1251 bp, synthetic construct
  misc_feature 1..1251: note = variant of acetate kinase from Marinitoga sp.38H-ov
  source 1..1251: mol_type = other DNA
atgcaccatcatcatcatcatggcggtagcggcatgaaagttctggtgattaattctggtagctcctccatcaaatatcagctcctcgatatgaccaacgaaaaggtattagcgaaaggcttggtcgagcgcattggcatcgacggttcgcgtatcgtgcataaagttaacggcgaagggcacgtgctggaacatgagattaaaaatcacgaaattggacttaaattggtcctggatcttcttacggacgaaaaatacggtgtgttgaaggatctcaaagaaatcgatgcagttgggcatcgcgtagtacatggcggcgagcgttttgccagtagcgtgaagattactgacgaagtcttaaagaccatcgagacgttgtcgttcttagctccgttacacaatccagcgaacattatgggtatcaagagcagcatgaaagtgttaccgggtgtgcctcaagttgccgtctttgatacagcgttccaccagaagatgccggagaaagcctatttgtacgcaatcccctatgagtactacgagaaatataaaattcgccgctatgggtttcatggaacctcacatcgttatgtgagtaaacgtgctgcggaaattatgggcaaaccgtacgatcagctcaagatcattaccgttcacgtgggtaacggcgcatcagttgcggcggtgaagaatggcgtatctgttgacacttccatgggtttcacaccacttgaaggtcttgtcatgggcacgcgcagcggcgatattgatccggccatcgtggaatttcttgagaaagaagaaggattgtcggccaaagaagtcgtcaacatcctcaacaagaaatctggtgtgtatgggctcaccaaaggctttagtagtgacatgcgtgacattgtgctgaaggctattgaaggtgatcctgtatgccgccttgcattagatgtgaggtattatcgtatcgcgaaatatattggcgcatacgctgcggccatgaacggtgttgacgcgatcgtctttaccgcaggagttggcgaaaatagcccgattatgcgcgaagaaattattgagaactacttgggctacttagggatcaagatcgataaagaagccaatgacttcaaaggtgaggagaagatcatttcaacgcccgattccaaagtgattgcgatggtagttccgaccaacgaggagctcatgatcgccaaagacacgaaagaaatcattgagaaagggttggacgagcttaagatc

SEQ ID NO: 980 - protein, 417 aa, synthetic construct
  REGION 1..417: note = variant of acetate kinase from Marinitoga sp.38H-ov
MHHHHHHGGSGMKVLVINSGSSSIKYQLLDMTNEKVLAKGLVERIGIDGSRIVHKVNGEGHVLEHEIKNHEIGLKLVLDLLTDEKYGVLKDLKEIDAVGHRVVHGGERFASSVKITDEVLKTIETLSFLAPLHNPANIMGIKSSMKVLPGVPQVAVFDTAFHQKMPEKAYLYAIPYEYYEKYKIRRYGFHGTSHRYVSKRAAEIMGKPYDQLKIITVHVGNGASVAAVKNGVSVDTSMGFTPLEGLVMGTRSGDIDPAIVEFLEKEEGLSAKEVVNILNKKSGVYGLTKGFSSDMRDIVLKAIEGDPVCRLALDVRYYRIAKYIGAYAAAMNGVDAIVFTAGVGENSPIMREEIIENYLGYLGIKIDKEANDFKGEEKIISTPDSKVIAMVVPTNEELMIAKDTKEIIEKGLDELKI

SEQ ID NO: 981 - DNA, 1251 bp, synthetic construct
  misc_feature 1..1251: note = variant of acetate kinase from Marinitoga sp.38H-ov
  source 1..1251: mol_type = other DNA
atgcaccatcatcatcatcatggcggtagcggcatgaaagttctggtgattaatttgggtagctcctccatcaaatatcagctcctcgatatgaccaacgaaaaggtattagcgaaaggcttggtcgagcgcattggcatcgacggttcgcgtatcgtgcataaagttaacggcgaagggcacgtgctggaacatgagattaaaaatcacgaaattggacttaaattggtcctggatcttcttacggacgaaaaatacggtgtgttgaaggatctcaaagaaatcgatgcagttgggcatcgcgtagtacatggcggcgagcgttttgccagtagcgtgaagattactgacgaagtcttaaagaccatcgagacgttgtcgttcttagctccgttacacaatccagcgaacattatgggtatcaagagcagcatgaaagtgttaccgggtgtgcctcaagttgccgtctttgatacagcgttccaccagaagatgccggagaaagcctatttgtacgcaatcccctatgagtactacgagaaatataaaattcgccgctatgggtttcatggaacctcacatcgttatgtgagtaaacgtgctgcggaaattatgggcaaaccgtacgatcagctcaagatcattaccgttcacgtgggtaacggcgcatcagttgcggcggtgaagaatggcgtatctgttgacacttccatgggtttcacaccacttgaaggtcttgtcatgggcacgcgcagcggcgatattgatccggccatcgtggaatttcttgagaaagaagaaggattgtcggccaaagaagtcgtcaacatcctcaacaagaaatctggtgtgtatgggctcaccaaaggctttagtagggacatgcgtgacattgtgctgaaggctattgaaggtgatcctgtatgccgccttgcattagatgtgtattattatcgtatcgcgaaatatattggcgcatacgctgcggccatgaacggtgttgacgcgatcgtctttaccgcaggagttggcgaaaatagcccgattatgcgcgaagaaattattgagaactacttgggctacttagggatcaagatcgataaagaagccaatgacttcaaaggtgaggagaagatcatttcaacgcccgattccaaagtgattgcgatggtagttccgaccaacgaggagctcatgatcgccaaagacacgaaagaaatcattgagaaagggttggacgagcttaagatc

SEQ ID NO: 982 - protein, 417 aa, synthetic construct
  REGION 1..417: note = variant of acetate kinase from Marinitoga sp.38H-ov
MHHHHHHGGSGMKVLVINLGSSSIKYQLLDMTNEKVLAKGLVERIGIDGSRIVHKVNGEGHVLEHEIKNHEIGLKLVLDLLTDEKYGVLKDLKEIDAVGHRVVHGGERFASSVKITDEVLKTIETLSFLAPLHNPANIMGIKSSMKVLPGVPQVAVFDTAFHQKMPEKAYLYAIPYEYYEKYKIRRYGFHGTSHRYVSKRAAEIMGKPYDQLKIITVHVGNGASVAAVKNGVSVDTSMGFTPLEGLVMGTRSGDIDPAIVEFLEKEEGLSAKEVVNILNKKSGVYGLTKGFSRDMRDIVLKAIEGDPVCRLALDVYYYRIAKYIGAYAAAMNGVDAIVFTAGVGENSPIMREEIIENYLGYLGIKIDKEANDFKGEEKIISTPDSKVIAMVVPTNEELMIAKDTKEIIEKGLDELKI

SEQ ID NO: 983 - DNA, 1251 bp, synthetic construct
  misc_feature 1..1251: note = variant of acetate kinase from Marinitoga sp.38H-ov
  source 1..1251: mol_type = other DNA
atgcaccatcatcatcatcatggcggtagcggcatgaaagttctggtgattaattctggtagctcctccatcaaatatcagctcctcgatatgaccaacgaaaaggtattagcgaaaggcttggtcgagcgcattggcatcgacggttcgcgtatcgtgcataaagttaacggcgaagggcacgtgctggaacatgagattaaaaatcacgaaattggacttaaattggtcctggatcttcttacggacgaaaaatacggtgtgttgaaggatctcaaagaaatcgatgcagttgggcatcgcgtagtacatggcggcgagcgttttgccagtagcgtgaagattactgacgaagtcttaaagaccatcgagacgttgtcgttcttagctccgttacacaatccagcgaacattatgggtatcaagagcagcatgaaagtgttaccgggtgtgcctcaagttgccgtctttgatacagcgttccaccagaagatgccggagaaagcctatttgtacgcaatcccctatgagtactacgagaaatataaaattcgccgctatgggtttcatggaacctcacatcgttatgtgagtaaacgtgctgcggaaattatgggcaaaccgtacgatcagctcaagatcattaccgttcacgtgggtaacggcgcatcagttgcggcggtgaagaatggcgtatctgttgacacttccatgggtttcacaccacttgaaggtcttgtcatgggcacgcgcagcggcgatattgatccggccatcgtggaatttcttgagaaagaagaaggattgtcggccaaagaagtcgtcaacatcctcaacaagaaatctggtgtgtatgggctcaccaaaggctttagtagggacatgcgtgacattgtgctgaaggctattgaaggtgatcctgtatgccgccttgcattagatgtgtattattatcgtatcgcgaaatatattggcgcatacgctgcggccatgaacggtgttgacgcgatcgtctttaccgcaggagttggcgaaaatagcccgattatgcgcgaagaaattattgagaactacttgggctacttagggatcaagatcgataaagaagccaatgacttcaaaggtgaggagaagatcatttcaacgcccgatgagaaagtgattgcgatggtagttccgaccaacgaggagctcatgatcgccaaagacacgaaagaaatcattgagaaagggttggacgagcttaagatc

SEQ ID NO: 984 - protein, 417 aa, synthetic construct
  REGION 1..417: note = variant of acetate kinase from Marinitoga sp.38H-ov
MHHHHHHGGSGMKVLVINSGSSSIKYQLLDMTNEKVLAKGLVERIGIDGSRIVHKVNGEGHVLEHEIKNHEIGLKLVLDLLTDEKYGVLKDLKEIDAVGHRVVHGGERFASSVKITDEVLKTIETLSFLAPLHNPANIMGIKSSMKVLPGVPQVAVFDTAFHQKMPEKAYLYAIPYEYYEKYKIRRYGFHGTSHRYVSKRAAEIMGKPYDQLKIITVHVGNGASVAAVKNGVSVDTSMGFTPLEGLVMGTRSGDIDPAIVEFLEKEEGLSAKEVVNILNKKSGVYGLTKGFSRDMRDIVLKAIEGDPVCRLALDVYYYRIAKYIGAYAAAMNGVDAIVFTAGVGENSPIMREEIIENYLGYLGIKIDKEANDFKGEEKIISTPDEKVIAMVVPTNEELMIAKDTKEIIEKGLDELKI

SEQ ID NO: 985 - DNA, 1251 bp, synthetic construct
  misc_feature 1..1251: note = variant of acetate kinase from Marinitoga sp.38H-ov
  source 1..1251: mol_type = other DNA
atgcaccatcatcatcatcatggcggtagcggcatgaaagttctggtgattaattctggtagctcctccatcaaatatcagctcctcgatatgaccaacgaaaaggtattagcgaaaggcttggtcgagcgcattggcatcgacggttcgcgtatcgtgcataaagttaacggcgaagggcacgtgctggaacatgagattaaaaatcacgaaattggacttaaattggtcctggatcttcttacggacgaaaaatacggtgtgttgaaggatctcaaagaaatcgatgcagttgggcatcgcgtagtacatggcggcgagcgttttgccagtagcgtgaagattactgacgaagtcttaaagaccatcgagacgttgtcgttcttagctccgttacacaatccagcgaacattatgggtatcaagagcagcatgaaagtgttaccgggtgtgcctcaagttgccgtctttgatacagcgttccaccagaagatgccggagaaagcctatttgtacgcaatcccctatgagtactacgagaaatataaaattcgccgctatgggtttcatggaacctcacatcgttatgtgagtaaacgtgctgcggaaattatgggcaaaccgtacgatcagctcaagatcattaccgttcacgtgggtaacggcgcatcagttgcggcggtgaagaatccggtatctgttgacacttccatgggtttcacaccacttgaaggtcttgtcatgggcacgcgcagcggcgatattgatccggccatcgtggaatttcttgagaaagaagaaggattgtcggccaaagaagtcgtcaacatcctcaacaagaaatctggtgtgtatgggctcaccaaaggctttagtagggacatgcgtgacattgtgctgaaggctattgaaggtgatcctgtatgccgccttgcattagatgtgtattattatcgtatcgcgaaatatattggcgcatacgctgcggccatgaacggtgttgacgcgatcgtctttaccgcaggagttggcgaaaatagcccgattatgcgcgaagaaattattgagaactacttgggctacttagggatcaagatcgataaagaagccaatgacttcaaaggtgaggagaagatcatttcaacgcccgattccaaagtgattgcgatggtagttccgaccaacgaggagctcatgatcgccaaagacacgaaagaaatcattgagaaagggttggacgagcttaagatc

SEQ ID NO: 986 - protein, 417 aa, synthetic construct
  REGION 1..417: note = variant of acetate kinase from Marinitoga sp.38H-ov
MHHHHHHGGSGMKVLVINSGSSSIKYQLLDMTNEKVLAKGLVERIGIDGSRIVHKVNGEGHVLEHEIKNHEIGLKLVLDLLTDEKYGVLKDLKEIDAVGHRVVHGGERFASSVKITDEVLKTIETLSFLAPLHNPANIMGIKSSMKVLPGVPQVAVFDTAFHQKMPEKAYLYAIPYEYYEKYKIRRYGFHGTSHRYVSKRAAEIMGKPYDQLKIITVHVGNGASVAAVKNPVSVDTSMGFTPLEGLVMGTRSGDIDPAIVEFLEKEEGLSAKEVVNILNKKSGVYGLTKGFSRDMRDIVLKAIEGDPVCRLALDVYYYRIAKYIGAYAAAMNGVDAIVFTAGVGENSPIMREEIIENYLGYLGIKIDKEANDFKGEEKIISTPDSKVIAMVVPTNEELMIAKDTKEIIEKGLDELKI

SEQ ID NO: 987 - DNA, 1251 bp, synthetic construct
  misc_feature 1..1251: note = variant of acetate kinase from Marinitoga sp.38H-ov
  source 1..1251: mol_type = other DNA
atgcaccatcatcatcatcatggcggtagcggcatgaaagttctggtgattaattctggtagctcctccatcaaatatcagctcctcgatatgaccaacgaaaaggtattagcgaaaggcttggtcgagcgcattggcatcgacggttcgcgtatcgtgcataaagttaacggcgaagggcacgtgctggaacatgagattaaaaatcacgaaattggacttaaattggtcctggatcttcttacggacgaaaaatacggtgtgttgaaggatctcaaagaaatcgatgcagttgggcatcgcgtagtacatggcggcgagcgttttgccagtagcgtgaagattactgacgaagtcttaaagaccatcgagacgttgtcgttcttagctccgttacacaatccagcgaacattatgggtatcaagagcagcatgaaagtgttaccgggtgtgcctcaagttgccgtctttgatacagcgttccaccagaagatgccggagaaagcctatttgtacgcaatcccctatgagtactacgagaaatataaaattcgccgctatgggtttcatggaacctcacatcgttatgtgagtaaacgtgctgcggaaattatgggcaaaccgaaggatcagctcaagatcattaccgttcacgtgggtaacggcgcatcagttgcggcggtgaagaatggcgtatctgttgacacttccatgggtttcacaccacttgaaggtcttgtcatgggcacgcgcagcggcgatattgatccggccatcgtggaatttcttgagaaagaagaaggattgtcggccaaagaagtcgtcaacatcctcaacaagaaatctggtgtgtatgggctcaccaaaggctttagtagggacatgcgtgacattgtgctgaaggctattgaaggtgatcctgtatgccgccttgcattagatgtgtattattatcgtatcgcgaaatatattggcgcatacgctgcggccatgaacggtgttgacgcgatcgtctttaccgcaggagttggcgaaaatagcccgattatgcgcgaagaaattattgagaactacttgggctacttagggatcaagatcgataaagaagccaatgacttcaaaggtgaggagaagatcatttcaacgcccgattccaaagtgattgcgatggtagttccgaccaacgaggagctcatgatcgccaaagacacgaaagaaatcattgagaaagggttggacgagcttaagatc

SEQ ID NO: 988 - protein, 417 aa, synthetic construct
  REGION 1..417: note = variant of acetate kinase from Marinitoga sp.38H-ov
MHHHHHHGGSGMKVLVINSGSSSIKYQLLDMTNEKVLAKGLVERIGIDGSRIVHKVNGEGHVLEHEIKNHEIGLKLVLDLLTDEKYGVLKDLKEIDAVGHRVVHGGERFASSVKITDEVLKTIETLSFLAPLHNPANIMGIKSSMKVLPGVPQVAVFDTAFHQKMPEKAYLYAIPYEYYEKYKIRRYGFHGTSHRYVSKRAAEIMGKPKDQLKIITVHVGNGASVAAVKNGVSVDTSMGFTPLEGLVMGTRSGDIDPAIVEFLEKEEGLSAKEVVNILNKKSGVYGLTKGFSRDMRDIVLKAIEGDPVCRLALDVYYYRIAKYIGAYAAAMNGVDAIVFTAGVGENSPIMREEIIENYLGYLGIKIDKEANDFKGEEKIISTPDSKVIAMVVPTNEELMIAKDTKEIIEKGLDELKI

SEQ ID NO: 989 - DNA, 1251 bp, synthetic construct
  misc_feature 1..1251: note = variant of acetate kinase from Marinitoga sp.38H-ov
  source 1..1251: mol_type = other DNA
atgcaccatcatcatcatcatggcggtagcggcatgaaagttctggtgattaattctggtagctcctccatcaaatatcagctcctcgattttaccaacgaaaaggtattagcgaaaggcttggtcgagcgcattggcatcgacggttcgcgtatcgtgcataaagttaacggcgaagggcacgtgctggaacatgagattaaaaatcacgaaattggacttaaattggtcctggatcttcttacggacgaaaaatacggtgtgttgaaggatctcaaagaaatcgatgcagttgggcatcgcgtagtacatggcggcgagcgttttgccagtagcgtgaagattactgacgaagtcttaaagaccatcgagacgttgtcgttcttagctccgttacacaatccagcgaacattatgggtatcaagagcagcatgaaagtgttaccgggtgtgcctcaagttgccgtctttgatacagcgttccaccagaagatgccggagaaagcctatttgtacgcaatcccctatgagtactacgagaaatataaaattcgccgctatgggtttcatggaacctcacatcgttatgtgagtaaacgtgctgcggaaattatgggcaaaccgtacgatcagctcaagatcattaccgttcacgtgggtaacggcgcatcagttgcggcggtgaagaatggcgtatctgttgacacttccatgggtttcacaccacttgaaggtcttgtcatgggcacgcgcagcggcgatattgatccggccatcgtggaatttcttgagaaagaagaaggattgtcggccaaagaagtcgtcaacatcctcaacaagaaatctggtgtgtatgggctcaccaaaggctttagtagggacatgcgtgacattgtgctgaaggctattgaaggtgatcctgtatgccgccttgcattagatgtgtattattatcgtatcgcgaaatatattggcgcatacgctgcggccatgaacggtgttgacgcgatcgtctttaccgcaggagttggcgaaaatagcccgattatgcgcgaagaaattattgagaactacttgggctacttagggatcaagatcgataaagaagccaatgacttcaaaggtgaggagaagatcatttcaacgcccgattccaaagtgattgcgatggtagttccgaccaacgaggagctcatgatcgccaaagacacgaaagaaatcattgagaaagggttggacgagcttaagatc

SEQ ID NO: 990 - protein, 417 aa, synthetic construct
  REGION 1..417: note = variant of acetate kinase from Marinitoga sp.38H-ov
MHHHHHHGGSGMKVLVINSGSSSIKYQLLDFTNEKVLAKGLVERIGIDGSRIVHKVNGEGHVLEHEIKNHEIGLKLVLDLLTDEKYGVLKDLKEIDAVGHRVVHGGERFASSVKITDEVLKTIETLSFLAPLHNPANIMGIKSSMKVLPGVPQVAVFDTAFHQKMPEKAYLYAIPYEYYEKYKIRRYGFHGTSHRYVSKRAAEIMGKPYDQLKIITVHVGNGASVAAVKNGVSVDTSMGFTPLEGLVMGTRSGDIDPAIVEFLEKEEGLSAKEVVNILNKKSGVYGLTKGFSRDMRDIVLKAIEGDPVCRLALDVYYYRIAKYIGAYAAAMNGVDAIVFTAGVGENSPIMREEIIENYLGYLGIKIDKEANDFKGEEKIISTPDSKVIAMVVPTNEELMIAKDTKEIIEKGLDELKI

SEQ ID NO: 991 - DNA, 1251 bp, synthetic construct
  misc_feature 1..1251: note = variant of acetate kinase from Marinitoga sp.38H-ov
  source 1..1251: mol_type = other DNA
atgcaccatcatcatcatcatggcggtagcggcatgaaagttctggtgattaattctggtagctcctccatcaaatatcagctcctcgatatgaccaacgaaaaggtattagcgaaaggcttggtcgagcgcattggcatcgacggttcgcgtatcgtgcataaagttaacggcgaagggcacgtgctggaacatgagattaaaaatcacgaaattggacttaaattggtcctggatcttcttacggacgaaaaatacggtgtgttgaaggatctcaaagaaatcgatgcagttgggcatcgcgtagtacatggcggcgagcgttttgccagtagcgtgaagattactgacgaagtcttaaagaccatcgagacgttgtcgttcttagctccgttacacaatccagcgaacattatgggtatcaagagcagcatgaaagtgttaccgggtgtgcctcaagttgccgtctttgatacagcgttccaccagaagatgccggagaaagcctatttgtacgcaatcccctatgagtactacgagaaatataaaattcgccgctatgggtttcatggaacctcacatcgttatgtgagtaaacgtgctgcggaaattatgggcaaaccgtacgatcagctcaagatcattaccgttcacgtgggtaacggcgcatcagttgcggcggtgaagaatggcgtatctgttgacacttccatgggtttcacaccacttgaaggtcttgtcatgggcacgcgcagcggcgatattgatccggccatcgtggaatttcttgagaaagaagaaggattgtcggccaaagaagtcgtcaacatcctcaacaagaaatctggtgtgtatgggctcaccaaaggctttagtagggacatgcgtgacattgtgctgaaggctattgaaggtgatcctgtatgccgccttgcattagatgtgtattattatcgtatcgcgaaatatattggcgcatacgctgcggccatgaacggtgttgacgcgatcgtctttaccgcaggagttggcgaaaatagcccgattatgcgcgaagaaattattgagaactacttgggctacttagggatcaagatcgataaagaattgaatgacttcaaaggtgaggagaagatcatttcaacgcccgattccaaagtgattgcgatggtagttccgaccaacgaggagctcatgatcgccaaagacacgaaagaaatcattgagaaagggttggacgagcttaagatc

SEQ ID NO: 992 - protein, 417 aa, synthetic construct
  REGION 1..417: note = variant of acetate kinase from Marinitoga sp.38H-ov
MHHHHHHGGSGMKVLVINSGSSSIKYQLLDMTNEKVLAKGLVERIGIDGSRIVHKVNGEGHVLEHEIKNHEIGLKLVLDLLTDEKYGVLKDLKEIDAVGHRVVHGGERFASSVKITDEVLKTIETLSFLAPLHNPANIMGIKSSMKVLPGVPQVAVFDTAFHQKMPEKAYLYAIPYEYYEKYKIRRYGFHGTSHRYVSKRAAEIMGKPYDQLKIITVHVGNGASVAAVKNGVSVDTSMGFTPLEGLVMGTRSGDIDPAIVEFLEKEEGLSAKEVVNILNKKSGVYGLTKGFSRDMRDIVLKAIEGDPVCRLALDVYYYRIAKYIGAYAAAMNGVDAIVFTAGVGENSPIMREEIIENYLGYLGIKIDKELNDFKGEEKIISTPDSKVIAMVVPTNEELMIAKDTKEIIEKGLDELKI

SEQ ID NO: 993 - DNA, 1251 bp, synthetic construct
  misc_feature 1..1251: note = variant of acetate kinase from Marinitoga sp.38H-ov
  source 1..1251: mol_type = other DNA
atgcaccatcatcatcatcatggcggtagcggcatgaaagttctggtgattaattctggtagctcctccatcaaatatcagctcctcgatatgaccaacgaaaaggtattagcgaaaggcttggtcgagcgcattggcatcgacggttcgcgtatcgtgcataaagttaacggcgaagggcacgtgctggaacatgagattaaaaatcacgaaattggacttaaattggtcctggatcttcttacggacgaaaaatacggtgtgttgaaggatctcaaagaaatcgatgcagttgggcatcgcgtagtacatggcggcgagcgttttgccagtagcgtgaagattactgacgaagtcttaaagaccatcgagacgttgtcgttcttagctccgttacacaatccagcgaacattatgggtatcaagagcagcatgaaagtgttaccgggtgtgcctcaagttgccgtctttgatacagcgttccaccagaagatgccggagaaagcctatttgtacgcaatcccctatgagtactacgagaaatatctgattcgccgctatgggtttcatggaacctcacatcgttatgtgagtaaacgtgctgcggaaattatgggcaaaccgtacgatcagctcaagatcattaccgttcacgtgggtaacggcgcatcagttgcggcggtgaagaatggcgtatctgttgacacttccatgggtttcacaccacttgaaggtcttgtcatgggcacgcgcagcggcgatattgatccggccatcgtggaatttcttgagaaagaagaaggattgtcggccaaagaagtcgtcaacatcctcaacaagaaatctggtgtgtatgggctcaccaaaggctttagtagggacatgcgtgacattgtgctgaaggctattgaaggtgatcctgtatgccgccttgcattagatgtgtattattatcgtatcgcgaaatatattggcgcatacgctgcggccatgaacggtgttgacgcgatcgtctttaccgcaggagttggcgaaaatagcccgattatgcgcgaagaaattattgagaactacttgggctacttagggatcaagatcgataaagaagccaatgacttcaaaggtgaggagaagatcatttcaacgcccgattccaaagtgattgcgatggtagttccgaccaacgaggagctcatgatcgccaaagacacgaaagaaatcattgagaaagggttggacgagcttaagatc

SEQ ID NO: 994 - protein, 417 aa, synthetic construct
  REGION 1..417: note = variant of acetate kinase from Marinitoga sp.38H-ov
MHHHHHHGGSGMKVLVINSGSSSIKYQLLDMTNEKVLAKGLVERIGIDGSRIVHKVNGEGHVLEHEIKNHEIGLKLVLDLLTDEKYGVLKDLKEIDAVGHRVVHGGERFASSVKITDEVLKTIETLSFLAPLHNPANIMGIKSSMKVLPGVPQVAVFDTAFHQKMPEKAYLYAIPYEYYEKYLIRRYGFHGTSHRYVSKRAAEIMGKPYDQLKIITVHVGNGASVAAVKNGVSVDTSMGFTPLEGLVMGTRSGDIDPAIVEFLEKEEGLSAKEVVNILNKKSGVYGLTKGFSRDMRDIVLKAIEGDPVCRLALDVYYYRIAKYIGAYAAAMNGVDAIVFTAGVGENSPIMREEIIENYLGYLGIKIDKEANDFKGEEKIISTPDSKVIAMVVPTNEELMIAKDTKEIIEKGLDELKI

SEQ ID NO: 995 - DNA, 1251 bp, synthetic construct
  misc_feature 1..1251: note = variant of acetate kinase from Marinitoga sp.38H-ov
  source 1..1251: mol_type = other DNA
atgcaccatcatcatcatcatggcggtagcggcatgaaagttctggtgattaattctggtagctcctccatcaaatatcagctcctcgatatgaccaacgaaaaggtattagcgaaaggcttggtcgagcgcattggcatcgacggttcgcgtatcgtgcataaagttaacggcgaagggcacgtgctggaacatgagattaaaaatcacgaaattggacttaaattggtcctggatcttcttacggacgaaaaatacggtgtgttgaaggatctcaaagaaatcgatgcagttgggcatcgcgtagtacatggcggcgagcgttttgccagtagcgtgaagattactgacgaagtcttaaagaccatcgagacgttgtcgttcttagctccgttacacaatccagcgaacattatgggtatcaagagcagcatgaaagtgttaccgggtgtgcctcaagttgccgtctttgatacagcgttccaccagaagatgccggagaaagcctatttgtacgcaatcccctatgagtactacgagaaatataaaattcgccgctatgggtttcatggaacctcacatcgttatgtgagtaaacgtgctgcggaaattatgggcaaaccgtacgatcagctcaagatcattaccgttcacgtgggtaacggcgcatcagttgcggcggtgaagaatggcgtatctgttgacacttccatgggtttcacaccacttgaaggtcttgtcatgggcacgcgcagcggcgatattgatccgtatatcgtggaatttcttgagaaagaagaaggattgtcggccaaagaagtcgtcaacatcctcaacaagaaatctggtgtgtatgggctcaccaaaggctttagtagggacatgcgtgacattgtgctgaaggctattgaaggtgatcctgtatgccgccttgcattagatgtgtattattatcgtatcgcgaaatatattggcgcatacgctgcggccatgaacggtgttgacgcgatcgtctttaccgcaggagttggcgaaaatagcccgattatgcgcgaagaaattattgagaactacttgggctacttagggatcaagatcgataaagaagccaatgacttcaaaggtgaggagaagatcatttcaacgcccgattccaaagtgattgcgatggtagttccgaccaacgaggagctcatgatcgccaaagacacgaaagaaatcattgagaaagggttggacgagcttaagatc

SEQ ID NO: 996 - protein, 417 aa, synthetic construct
  REGION 1..417: note = variant of acetate kinase from Marinitoga sp.38H-ov
MHHHHHHGGSGMKVLVINSGSSSIKYQLLDMTNEKVLAKGLVERIGIDGSRIVHKVNGEGHVLEHEIKNHEIGLKLVLDLLTDEKYGVLKDLKEIDAVGHRVVHGGERFASSVKITDEVLKTIETLSFLAPLHNPANIMGIKSSMKVLPGVPQVAVFDTAFHQKMPEKAYLYAIPYEYYEKYKIRRYGFHGTSHRYVSKRAAEIMGKPYDQLKIITVHVGNGASVAAVKNGVSVDTSMGFTPLEGLVMGTRSGDIDPYIVEFLEKEEGLSAKEVVNILNKKSGVYGLTKGFSRDMRDIVLKAIEGDPVCRLALDVYYYRIAKYIGAYAAAMNGVDAIVFTAGVGENSPIMREEIIENYLGYLGIKIDKEANDFKGEEKIISTPDSKVIAMVVPTNEELMIAKDTKEIIEKGLDELKI

SEQ ID NO: 997 - DNA, 1251 bp, synthetic construct
  misc_feature 1..1251: note = variant of acetate kinase from Marinitoga sp.38H-ov
  source 1..1251: mol_type = other DNA
atgcaccatcatcatcatcatggcggtagcggcatgaaagagctggtgattaattctggtagctcctccatcaaatatcagctcctcgatatgaccaacgaaaaggtattagcgaaaggcttggtcgagcgcattggcatcgacggttcgcgtatcgtgcataaagttaacggcgaagggcacgtgctggaacatgagattaaaaatcacgaaattggacttaaattggtcctggatcttcttacggacgaaaaatacggtgtgttgaaggatctcaaagaaatcgatgcagttgggcatcgcgtagtacatggcggcgagcgttttgccagtagcgtgaagattactgacgaagtcttaaagaccatcgagacgttgtcgttcttagctccgttacacaatccagcgaacattatgggtatcaagagcagcatgaaagtgttaccgggtgtgcctcaagttgccgtctttgatacagcgttccaccagaagatgccggagaaagcctatttgtacgcaatcccctatgagtactacgagaaatataaaattcgccgctatgggtttcatggaacctcacatcgttatgtgagtaaacgtgctgcggaaattatgggcaaaccgtacgatcagctcaagatcattaccgttcacgtgggtaacggcgcatcagttgcggcggtgaagaatggcgtatctgttgacacttccatgggtttcacaccacttgaaggtcttgtcatgggcacgcgcagcggcgatattgatccggccatcgtggaatttcttgagaaagaagaaggattgtcggccaaagaagtcgtcaacatcctcaacaagaaatctggtgtgtatgggctcaccaaaggctttagtagggacatgcgtgacattgtgctgaaggctattgaaggtgatcctgtatgccgccttgcattagatgtgtattattatcgtatcgcgaaatatattggcgcatacgctgcggccatgaacggtgttgacgcgatcgtctttaccgcaggagttggcgaaaatagcccgattatgcgcgaagaaattattgagaactacttgggctacttagggatcaagatcgataaagaagccaatgacttcaaaggtgaggagaagatcatttcaacgcccgattccaaagtgattgcgatggtagttccgaccaacgaggagctcatgatcgccaaagacacgaaagaaatcattgagaaagggttggacgagcttaagatc

SEQ ID NO: 998 - protein, 417 aa, synthetic construct
  REGION 1..417: note = variant of acetate kinase from Marinitoga sp.38H-ov
MHHHHHHGGSGMKELVINSGSSSIKYQLLDMTNEKVLAKGLVERIGIDGSRIVHKVNGEGHVLEHEIKNHEIGLKLVLDLLTDEKYGVLKDLKEIDAVGHRVVHGGERFASSVKITDEVLKTIETLSFLAPLHNPANIMGIKSSMKVLPGVPQVAVFDTAFHQKMPEKAYLYAIPYEYYEKYKIRRYGFHGTSHRYVSKRAAEIMGKPYDQLKIITVHVGNGASVAAVKNGVSVDTSMGFTPLEGLVMGTRSGDIDPAIVEFLEKEEGLSAKEVVNILNKKSGVYGLTKGFSRDMRDIVLKAIEGDPVCRLALDVYYYRIAKYIGAYAAAMNGVDAIVFTAGVGENSPIMREEIIENYLGYLGIKIDKEANDFKGEEKIISTPDSKVIAMVVPTNEELMIAKDTKEIIEKGLDELKI

SEQ ID NO: 999 - DNA, 1251 bp, synthetic construct
  misc_feature 1..1251: note = variant of acetate kinase from Marinitoga sp.38H-ov
  source 1..1251: mol_type = other DNA
atgcaccatcatcatcatcatggcggtagcggcatgaaagttctggtgattaattctggtagctcctccatcaaatatcagctcctcgatatgaccaacgaaaaggtattagcgaaaggcttggtcgagcgcattggcatcgacggttcgcgtatcgtgcataaagttaacggcgaagggcacgtgctggaacatgagattaaaaatcacgaaattggacttaaattggtcctggatcttcttacggacgaaaaatacggtgtgttgaaggatctcaaagaaatcgatgcagttgggcatcgcgtagtacatggcggcgagcgttttgccagtagcgtgaagattactgacgaagtcttaaagaccatcgagacgttgtcgttcttagctccgttacacaatccagcgaacattatgggtatcaagagcagcatgaaagtgttaccgggtgtgcctcaagttgccgtctttgatacagcgttccaccagaagatgccggagaaagcctatttgtacgcaatcccctatgagtactacgagaaatataaaattcgccgctatgggtttcatggaacctcacatcgttatgtgagtaaacgtgctgcggaaattatgggcaaaccgtacgatcagactaagatcattaccgttcacgtgggtaacggcgcatcagttgcggcggtgaagaatggcgtatctgttgacacttccatgggtttcacaccacttgaaggtcttgtcatgggcacgcgcagcggcgatattgatccggccatcgtggaatttcttgagaaagaagaaggattgtcggccaaagaagtcgtcaacatcctcaacaagaaatctggtgtgtatgggctcaccaaaggctttagtagggacatgcgtgacattgtgctgaaggctattgaaggtgatcctgtatgccgccttgcattagatgtgtattattatcgtatcgcgaaatatattggcgcatacgctgcggccatgaacggtgttgacgcgatcgtctttaccgcaggagttggcgaaaatagcccgattatgcgcgaagaaattattgagaactacttgggctacttagggatcaagatcgataaagaagccaatgacttcaaaggtgaggagaagatcatttcaacgcccgattccaaagtgattgcgatggtagttccgaccaacgaggagctcatgatcgccaaagacacgaaagaaatcattgagaaagggttggacgagcttaagatc

SEQ ID NO: 1000 - protein, 417 aa, synthetic construct
  REGION 1..417: note = variant of acetate kinase from Marinitoga sp.38H-ov
MHHHHHHGGSGMKVLVINSGSSSIKYQLLDMTNEKVLAKGLVERIGIDGSRIVHKVNGEGHVLEHEIKNHEIGLKLVLDLLTDEKYGVLKDLKEIDAVGHRVVHGGERFASSVKITDEVLKTIETLSFLAPLHNPANIMGIKSSMKVLPGVPQVAVFDTAFHQKMPEKAYLYAIPYEYYEKYKIRRYGFHGTSHRYVSKRAAEIMGKPYDQTKIITVHVGNGASVAAVKNGVSVDTSMGFTPLEGLVMGTRSGDIDPAIVEFLEKEEGLSAKEVVNILNKKSGVYGLTKGFSRDMRDIVLKAIEGDPVCRLALDVYYYRIAKYIGAYAAAMNGVDAIVFTAGVGENSPIMREEIIENYLGYLGIKIDKEANDFKGEEKIISTPDSKVIAMVVPTNEELMIAKDTKEIIEKGLDELKI

SEQ ID NO: 1001 - DNA, 1251 bp, synthetic construct
  misc_feature 1..1251: note = variant of acetate kinase from Marinitoga sp.38H-ov
  source 1..1251: mol_type = other DNA
atgcaccatcatcatcatcatggcggtagcggcatgaaagttctggtgattaattctggtagctcctccatcaaatatcagctcctcgatatgaccaacgaaaaggtattagcgaaaggcttggtcgagcgcattggcatcgacggttcgcgtatcgtgcataaagttaacggcgaagggcacgtgctggaacatgagattaaaaatcacgaaattggacttaaattggtcctggatcttcttacggacgaaaaatacggtgtgttgaaggatctcaaagaaatcgatgcagttgggcatcgcgtagtacatggcggcgagcgttttgccagtagcgtgaagattactgacgaagtcttaaagaccatcgagacgttgtcgttcttagctccgttacacaatccagcgaacattatgggtatcaagagcagcatgaaagtgttaccgggtgtgcctcaagttgccgtctttgatacagcgttccaccagaagatgccggagaaagcctatttgtacgcaatcccctatgagtactacgagaaatataaaattcgccgctatgggtttcatggaacctcacatcgttatgtgagtaaacgtgctgcggaaattatgggcaaaccgtacgatcagctcaagatcattaccgttcacgtgggtaacggcgcatcagttgcggcggtgaagaatggcgtatctgttgacacttccatgggtttcacaccacttgaaggtcttgtcatgggcacgcgcagcggcgatattgatccggccatcgtggaatttcttgagaaagaagaaggattgtcggccaaagaagtcgtcaacatcctcaacaagaaatctggtgtgtatgggctcaccaaaggctttagtagggacatgcgtgacattgtgctgaaggctattgaaggtgatcctgtatgccgccttgcattagatgtgtattattatcgtatcgcgaaatatattggcgcatacgctgcggccatgaacggtgttgacgcgatcgtctttaccgcaggagttggcgaaaatagcccgattatgcgcgaagaaattccggagaactacttgggctacttagggatcaagatcgataaagaagccaatgacttcaaaggtgaggagaagatcatttcaacgcccgattccaaagtgattgcgatggtagttccgaccaacgaggagctcatgatcgccaaagacacgaaagaaatcattgagaaagggttggacgagcttaagatc

SEQ ID NO: 1002 - protein, 417 aa, synthetic construct
  REGION 1..417: note = variant of acetate kinase from Marinitoga sp.38H-ov
MHHHHHHGGSGMKVLVINSGSSSIKYQLLDMTNEKVLAKGLVERIGIDGSRIVHKVNGEGHVLEHEIKNHEIGLKLVLDLLTDEKYGVLKDLKEIDAVGHRVVHGGERFASSVKITDEVLKTIETLSFLAPLHNPANIMGIKSSMKVLPGVPQVAVFDTAFHQKMPEKAYLYAIPYEYYEKYKIRRYGFHGTSHRYVSKRAAEIMGKPYDQLKIITVHVGNGASVAAVKNGVSVDTSMGFTPLEGLVMGTRSGDIDPAIVEFLEKEEGLSAKEVVNILNKKSGVYGLTKGFSRDMRDIVLKAIEGDPVCRLALDVYYYRIAKYIGAYAAAMNGVDAIVFTAGVGENSPIMREEIPENYLGYLGIKIDKEANDFKGEEKIISTPDSKVIAMVVPTNEELMIAKDTKEIIEKGLDELKI

SEQ ID NO: 1003 - DNA, 1251 bp, synthetic construct
  misc_feature 1..1251: note = variant of acetate kinase from Marinitoga sp.38H-ov
  source 1..1251: mol_type = other DNA
atgcaccatcatcatcatcatggcggtagcggcatgaaagttctggtgattaattctggtagctcctccatcaaatatcagctcctcgatatgaccaacgaaaaggtattagcgaaaggcttggtcgagcgcattggcatcgacggttcgcgtatcgtgctgaaagttaacggcgaagggcacgtgctggaacatgagattaaaaatcacgaaattggacttaaattggtcctggatcttcttacggacgaaaaatacggtgtgttgaaggatctcaaagaaatcgatgcagttgggcatcgcgtagtacatggcggcgagcgttttgccagtagcgtgaagattactgacgaagtcttaaagaccatcgagacgttgtcgttcttagctccgttacacaatccagcgaacattatgggtatcaagagcagcatgaaagtgttaccgggtgtgcctcaagttgccgtctttgatacagcgttccaccagaagatgccggagaaagcctatttgtacgcaatcccctatgagtactacgagaaatataaaattcgccgctatgggtttcatggaacctcacatcgttatgtgagtaaacgtgctgcggaaattatgggcaaaccgtacgatcagctcaagatcattaccgttcacgtgggtaacggcgcatcagttgcggcggtgaagaatggcgtatctgttgacacttccatgggtttcacaccacttgaaggtcttgtcatgggcacgcgcagcggcgatattgatccggccatcgtggaatttcttgagaaagaagaaggattgtcggccaaagaagtcgtcaacatcctcaacaagaaatctggtgtgtatgggctcaccaaaggctttagtagggacatgcgtgacattgtgctgaaggctattgaaggtgatcctgtatgccgccttgcattagatgtgtattattatcgtatcgcgaaatatattggcgcatacgctgcggccatgaacggtgttgacgcgatcgtctttaccgcaggagttggcgaaaatagcccgattatgcgcgaagaaattattgagaactacttgggctacttagggatcaagatcgataaagaagccaatgacttcaaaggtgaggagaagatcatttcaacgcccgattccaaagtgattgcgatggtagttccgaccaacgaggagctcatgatcgccaaagacacgaaagaaatcattgagaaagggttggacgagcttaagatc

SEQ ID NO: 1004 - protein, 417 aa, synthetic construct
  REGION 1..417: note = variant of acetate kinase from Marinitoga sp.38H-ov
MHHHHHHGGSGMKVLVINSGSSSIKYQLLDMTNEKVLAKGLVERIGIDGSRIVLKVNGEGHVLEHEIKNHEIGLKLVLDLLTDEKYGVLKDLKEIDAVGHRVVHGGERFASSVKITDEVLKTIETLSFLAPLHNPANIMGIKSSMKVLPGVPQVAVFDTAFHQKMPEKAYLYAIPYEYYEKYKIRRYGFHGTSHRYVSKRAAEIMGKPYDQLKIITVHVGNGASVAAVKNGVSVDTSMGFTPLEGLVMGTRSGDIDPAIVEFLEKEEGLSAKEVVNILNKKSGVYGLTKGFSRDMRDIVLKAIEGDPVCRLALDVYYYRIAKYIGAYAAAMNGVDAIVFTAGVGENSPIMREEIIENYLGYLGIKIDKEANDFKGEEKIISTPDSKVIAMVVPTNEELMIAKDTKEIIEKGLDELKI

SEQ ID NO: 1005 - DNA, 1251 bp, synthetic construct
  misc_feature 1..1251: note = variant of acetate kinase from Marinitoga sp.38H-ov
  source 1..1251: mol_type = other DNA
atgcaccatcatcatcatcatggcggtagcggcatgaaagttctggtgattaattctggtagctcctccatcaaatatcagctcctcgatatgaccaacgaaaaggtattagcgaaaggcttggtcgagcgcattggcatcgacggttcgcgtatcgtgcataaagttaacggcgaagggcacgtgctggaacatgagattaaaaatcacgaaattggacttaaattggtcctggatcttcttacggacgaaaaatacggtgtgttgaaggatctcaaagaaatcgatgcagttgggcatcgcgtagtacatggcggcgagcgttttgccagtagcgtgaagattactgacgaagtcttaaagaccatcgagacgttgtcgttcttagctccgttacacaatccagcgaacattatgggtatcaagagcagcatgaaagtgttaccgggtgtgcctcaagttgccgtctttgatacagcgttccaccagaagatgccggagaaagcctatttgtacgcaatcccctatgagtactacgagaaatataaaattcgccgctatgggtttcatggaacctcacatcgttatgtgagtaaacgtgctgcggaaattatgggcaaaccgtacgatcagctcaagatcattaccgttcacgtgggtaacggcgcatcagttgcggcggtgaagaatggcgtatctgttgacacttccatgggtgggacaccacttgaaggtcttgtcatgggcacgcgcagcggcgatattgatccggccatcgtggaatttcttgagaaagaagaaggattgtcggccaaagaagtcgtcaacatcctcaacaagaaatctggtgtgtatgggctcaccaaaggctttagtagggacatgcgtgacattgtgctgaaggctattgaaggtgatcctgtatgccgccttgcattagatgtgtattattatcgtatcgcgaaatatattggcgcatacgctgcggccatgaacggtgttgacgcgatcgtctttaccgcaggagttggcgaaaatagcccgattatgcgcgaagaaattattgagaactacttgggctacttagggatcaagatcgataaagaagccaatgacttcaaaggtgaggagaagatcatttcaacgcccgattccaaagtgattgcgatggtagttccgaccaacgaggagctcatgatcgccaaagacacgaaagaaatcattgagaaagggttggacgagcttaagatc

SEQ ID NO: 1006 - protein, 417 aa, synthetic construct
  REGION 1..417: note = variant of acetate kinase from Marinitoga sp.38H-ov
MHHHHHHGGSGMKVLVINSGSSSIKYQLLDMTNEKVLAKGLVERIGIDGSRIVHKVNGEGHVLEHEIKNHEIGLKLVLDLLTDEKYGVLKDLKEIDAVGHRVVHGGERFASSVKITDEVLKTIETLSFLAPLHNPANIMGIKSSMKVLPGVPQVAVFDTAFHQKMPEKAYLYAIPYEYYEKYKIRRYGFHGTSHRYVSKRAAEIMGKPYDQLKIITVHVGNGASVAAVKNGVSVDTSMGGTPLEGLVMGTRSGDIDPAIVEFLEKEEGLSAKEVVNILNKKSGVYGLTKGFSRDMRDIVLKAIEGDPVCRLALDVYYYRIAKYIGAYAAAMNGVDAIVFTAGVGENSPIMREEIIENYLGYLGIKIDKEANDFKGEEKIISTPDSKVIAMVVPTNEELMIAKDTKEIIEKGLDELKI

SEQ ID NO: 1007 - DNA, 1251 bp, synthetic construct
  misc_feature 1..1251: note = variant of acetate kinase from Marinitoga sp.38H-ov
  source 1..1251: mol_type = other DNA
atgcaccatcatcatcatcatggcggtagcggcatgaaagttctggtgattaattctggtagctcctccatcaaatatcagctcctcgatatgaccaacgaaaaggtattagcgaaaggcttggtcgagcgcattggcatcgacggttcgcgtatcgtgcataaagttaacggcgaagggcacgtgctggaacatgagattaaaaatcacgaaattggacttaaattggtcctggatcttcttacggacgaaaaatacggtgtgttgaaggatctcaaagaaatcgatgcagttgggcatcgcgtagtacatggcggcgagcgttttgccagtagcgtgaagattactgacgaagtcttaaagaccatcgagacgttgtcgttcttagctccgttacacaatccagcgaacattatgggtatcaagagcagcatgaaagtgttaccgggtgtgcctcaagttgccgtctttgatacagcgttccaccagaagatgccggagaaagcctatttgtacgcaatcccctatgagtactacgagaaatataaaattcgccgctatgggtttcatggaacctcacatcgttatgtgagtaaacgtgctgcggaaattatgggcaaaccgtacgatcagctcaagatcattaccgttcacgtgggtaacggcgcatcagttgcggcggtgaagaatggcgtatctgttgacacttccatgggtttcacaccacttgaaggtcttgtcatgggcacgcgcagcggcgatattgatccggccatcgtggaatttcttgagaaagaagaaggattgtcggccaaagaagtcgtcaacatcctcaacaagaaatctggtgtgtatgggctcaccaaaggctttagtagggacatgcgtgacattgtgctgaaggctattgaaggtgatcctgtatgccgccttgcattagatgtgtattattatcgtatcgcgaaaccgattggcgcatacgctgcggccatgaacggtgttgacgcgatcgtctttaccgcaggagttggcgaaaatagcccgattatgcgcgaagaaattattgagaactacttgggctacttagggatcaagatcgataaagaagccaatgacttcaaaggtgaggagaagatcatttcaacgcccgattccaaagtgattgcgatggtagttccgaccaacgaggagctcatgatcgccaaagacacgaaagaaatcattgagaaagggttggacgagcttaagatc

SEQ ID NO: 1008 - protein, 417 aa, synthetic construct
  REGION 1..417: note = variant of acetate kinase from Marinitoga sp.38H-ov
MHHHHHHGGSGMKVLVINSGSSSIKYQLLDMTNEKVLAKGLVERIGIDGSRIVHKVNGEGHVLEHEIKNHEIGLKLVLDLLTDEKYGVLKDLKEIDAVGHRVVHGGERFASSVKITDEVLKTIETLSFLAPLHNPANIMGIKSSMKVLPGVPQVAVFDTAFHQKMPEKAYLYAIPYEYYEKYKIRRYGFHGTSHRYVSKRAAEIMGKPYDQLKIITVHVGNGASVAAVKNGVSVDTSMGFTPLEGLVMGTRSGDIDPAIVEFLEKEEGLSAKEVVNILNKKSGVYGLTKGFSRDMRDIVLKAIEGDPVCRLALDVYYYRIAKPIGAYAAAMNGVDAIVFTAGVGENSPIMREEIIENYLGYLGIKIDKEANDFKGEEKIISTPDSKVIAMVVPTNEELMIAKDTKEIIEKGLDELKI

SEQ ID NO: 1009 - DNA, 1251 bp, synthetic construct
  misc_feature 1..1251: note = variant of acetate kinase from Marinitoga sp.38H-ov
  source 1..1251: mol_type = other DNA
atgcaccatcatcatcatcatggcggtagcggcatgaaagttctggtgattaattctggtagctcctccatcaaatatcagctcctcgatatgaccaacgaaaaggtattagcgaaaggcttggtcgagcgcattggcatcgacggttcgcgtatcgtgcataaagttaacggcgaagggcacgtgctggaacatgagattaaaaatcacgaaattggacttaaattggtcctggatcttcttacggacgaaaaatacggtgtgttgaaggatctcaaagaaatcgatgcagttgggcatcgcgtagtacatggcggcgagcgttttgccagtagcgtgaagattactgacgaagtcttaaagaccatcgagacgttgtcgttcttagctccgttacacaatccagcgaacattatgggtatcaagagcagcatgaaagtgttaccgggtgtgcctcaagttgccgtctttgatacagcgttccaccagaagatgccggagaaagcctatttgtacgcaatcccctatgagtactacgagaaatataaaattcgccgctatgggtttcatggaacctcacatcgttatgtgagtaaacgtgctgcggaaattatgggcaaaccgtacgatcagctcaagatcattaccgttcacgtgggtaacggcgcatcagttgcggcggtgaagaatggcgtatctgttgacacttccatgggtttcacaccacttgaaggtcttgtcatgggcacgcgcagcggcgatattgatccggccatcgtggaatttcttgagaaagaagaaggattgtcggccaaagaagtcgtcaacatcctcaacaagaaatctggtgtgtatgggctcaccaaaggctttagtagggacatgcgtgacattgtgctgaaggctattgaaggtgatcctgtatgccgccttgcattagatgtgtattattatcgtatcgcgaaatatattggcgcatacgctgcggccatgaacggtgttgacgcgatcgtctttaccgcaggagttggcgaaaatagcccgattatgcgcgaagaaattatttcgaactacttgggctacttagggatcaagatcgataaagaagccaatgacttcaaaggtgaggagaagatcatttcaacgcccgattccaaagtgattgcgatggtagttccgaccaacgaggagctcatgatcgccaaagacacgaaagaaatcattgagaaagggttggacgagcttaagatc

SEQ ID NO: 1010 - protein, 417 aa, synthetic construct
  REGION 1..417: note = variant of acetate kinase from Marinitoga sp.38H-ov
MHHHHHHGGSGMKVLVINSGSSSIKYQLLDMTNEKVLAKGLVERIGIDGSRIVHKVNGEGHVLEHEIKNHEIGLKLVLDLLTDEKYGVLKDLKEIDAVGHRVVHGGERFASSVKITDEVLKTIETLSFLAPLHNPANIMGIKSSMKVLPGVPQVAVFDTAFHQKMPEKAYLYAIPYEYYEKYKIRRYGFHGTSHRYVSKRAAEIMGKPYDQLKIITVHVGNGASVAAVKNGVSVDTSMGFTPLEGLVMGTRSGDIDPAIVEFLEKEEGLSAKEVVNILNKKSGVYGLTKGFSRDMRDIVLKAIEGDPVCRLALDVYYYRIAKYIGAYAAAMNGVDAIVFTAGVGENSPIMREEIISNYLGYLGIKIDKEANDFKGEEKIISTPDSKVIAMVVPTNEELMIAKDTKEIIEKGLDELKI

SEQ ID NO: 1011 - DNA, 1251 bp, synthetic construct
  misc_feature 1..1251: note = variant of acetate kinase from Marinitoga sp.38H-ov
  source 1..1251: mol_type = other DNA
atgcaccatcatcatcatcatggcggtagcggcatgaaagttctggtgattaattctggtagctcctccatcaaatatcagctcctcgatatgaccaacgaaaaggtattagcgaaaggcttggtcgagcgcattggcatcgacggttcgcgtatcgtgcataaagttaacggcgaagggcacgtgctggaacatgagattaaaaatcacgaaattggacttaaattggtcctggatcttcttacggacgaaaaatacggtgtgttgaaggatctcaaagaaatcgatgcagttgggcatcgcgtagtacatggcggcgagcgttttgccagtagcgtgaagattactgacgaagtcttaaagaccatcgagacgttgtcgttcttagctccgttacacaatccagcgaacattatgggtatcaagagcagcatgaaagtgttaccgggtgtgcctcaagttgccgtctttgatacagcgttccaccagaagatgccggagaaagcctatttgtacgcaatcccctatgagtactacgagaaaaggaaaattcgccgctatgggtttcatggaacctcacatcgttatgtgagtaaacgtgctgcggaaattatgggcaaaccgtacgatcagctcaagatcattaccgttcacgtgggtaacggcgcatcagttgcggcggtgaagaatggcgtatctgttgacacttccatgggtttcacaccacttgaaggtcttgtcatgggcacgcgcagcggcgatattgatccggccatcgtggaatttcttgagaaagaagaaggattgtcggccaaagaagtcgtcaacatcctcaacaagaaatctggtgtgtatgggctcaccaaaggctttagtagggacatgcgtgacattgtgctgaaggctattgaaggtgatcctgtatgccgccttgcattagatgtgtattattatcgtatcgcgaaatatattggcgcatacgctgcggccatgaacggtgttgacgcgatcgtctttaccgcaggagttggcgaaaatagcccgattatgcgcgaagaaattattgagaactacttgggctacttagggatcaagatcgataaagaagccaatgacttcaaaggtgaggagaagatcatttcaacgcccgattccaaagtgattgcgatggtagttccgaccaacgaggagctcatgatcgccaaagacacgaaagaaatcattgagaaagggttggacgagcttaagatc

SEQ ID NO: 1012 - protein, 417 aa, synthetic construct
  REGION 1..417: note = variant of acetate kinase from Marinitoga sp.38H-ov
MHHHHHHGGSGMKVLVINSGSSSIKYQLLDMTNEKVLAKGLVERIGIDGSRIVHKVNGEGHVLEHEIKNHEIGLKLVLDLLTDEKYGVLKDLKEIDAVGHRVVHGGERFASSVKITDEVLKTIETLSFLAPLHNPANIMGIKSSMKVLPGVPQVAVFDTAFHQKMPEKAYLYAIPYEYYEKRKIRRYGFHGTSHRYVSKRAAEIMGKPYDQLKIITVHVGNGASVAAVKNGVSVDTSMGFTPLEGLVMGTRSGDIDPAIVEFLEKEEGLSAKEVVNILNKKSGVYGLTKGFSRDMRDIVLKAIEGDPVCRLALDVYYYRIAKYIGAYAAAMNGVDAIVFTAGVGENSPIMREEIIENYLGYLGIKIDKEANDFKGEEKIISTPDSKVIAMVVPTNEELMIAKDTKEIIEKGLDELKI

SEQ ID NO: 1013 - DNA, 1251 bp, synthetic construct
  misc_feature 1..1251: note = variant of acetate kinase from Marinitoga sp.38H-ov
  source 1..1251: mol_type = other DNA
atgcaccatcatcatcatcatggcggtagcggcatgaaagttctggtgattaattctggtagctcctccatcaaatatcagctcctcgatatgaccaacgaaaaggtattagcgaaaggcttggtcgagcgcattggcatcgacggttcgcgtatcgtgcataaagttaacggcgaagggcacgtgctggaacatgagattaaaaatcacgaaattggacttaaattggtcctggatcttcttacggacgaaaaatacggtgtgttgaaggatctcaaagaaatcgatgcagttgggcatcgcgtagtacatggcggcgagcgttttgccagtagcgtgaagattactgacgaagtcttaaagaccatcgagacgttgtcgttcttagctccgttacacaatccagcgaacattatgggtatcaagagcagcatgaaagtgttaccgggtgtgcctcaagttgccgtctttgatacagcgttccaccagaagatgccggagaaagcctatttgtacgcaatcccctatgagtactacgagaaatataaaattcgccgctatgggtttcatggaacctcacatcgttatgtgagtaaacgtgctgcggaaattatgggcaaaccgtacgatcagctcaagatcattaccgttcacgtgggtaacggcgcatcagttgcggcggtgaagaatggcgtatctgttgacacttccatgggtttcacaccacttgaaggtcttgtcatgggcacgcgcagcggcgatattgatccggccatcgtggaattttgtgagaaagaagaaggattgtcggccaaagaagtcgtcaacatcctcaacaagaaatctggtgtgtatgggctcaccaaaggctttagtagggacatgcgtgacattgtgctgaaggctattgaaggtgatcctgtatgccgccttgcattagatgtgtattattatcgtatcgcgaaatatattggcgcatacgctgcggccatgaacggtgttgacgcgatcgtctttaccgcaggagttggcgaaaatagcccgattatgcgcgaagaaattattgagaactacttgggctacttagggatcaagatcgataaagaagccaatgacttcaaaggtgaggagaagatcatttcaacgcccgattccaaagtgattgcgatggtagttccgaccaacgaggagctcatgatcgccaaagacacgaaagaaatcattgagaaagggttggacgagcttaagatc

SEQ ID NO: 1014 - protein, 417 aa, synthetic construct
  REGION 1..417: note = variant of acetate kinase from Marinitoga sp.38H-ov
MHHHHHHGGSGMKVLVINSGSSSIKYQLLDMTNEKVLAKGLVERIGIDGSRIVHKVNGEGHVLEHEIKNHEIGLKLVLDLLTDEKYGVLKDLKEIDAVGHRVVHGGERFASSVKITDEVLKTIETLSFLAPLHNPANIMGIKSSMKVLPGVPQVAVFDTAFHQKMPEKAYLYAIPYEYYEKYKIRRYGFHGTSHRYVSKRAAEIMGKPYDQLKIITVHVGNGASVAAVKNGVSVDTSMGFTPLEGLVMGTRSGDIDPAIVEFCEKEEGLSAKEVVNILNKKSGVYGLTKGFSRDMRDIVLKAIEGDPVCRLALDVYYYRIAKYIGAYAAAMNGVDAIVFTAGVGENSPIMREEIIENYLGYLGIKIDKEANDFKGEEKIISTPDSKVIAMVVPTNEELMIAKDTKEIIEKGLDELKI

SEQ ID NO: 1015 - DNA, 1251 bp, synthetic construct
  misc_feature 1..1251: note = variant of acetate kinase from Marinitoga sp.38H-ov
  source 1..1251: mol_type = other DNA
atgcaccatcatcatcatcatggcggtagcggcatgaaagttctggtgattaattctggtagctcctccatcaaatatcagctcctcgatatgaccaacgaaaaggtattagcgaaaggcttggtcgagcgcattggcatcgacggttcgcgtatcgtgcataaagttaacggcgaagggcacgtgctggaacatgagattaaaaatcacgaaattggacttaaattggtcctggatcttcttacggacgaaaaatacggtgtgttgaaggatctcaaagaaatcgatgcagttgggcatcgcgtagtacatggcggcgagcgttttgccagtagcgtgaagattactgacgaagtcttaaagaccatcgagacgttgtcgttcttagctccgttacacaatccagcgaacattatgggtatcaagagcagcatgaaagtgttaccgggtgtgcctcaagttgccgtctttgatacagcgttccaccagaagatgccggagaaagcctatttgtacgcaatcccctatgagtactacgagaaatataaaattcgccgctatgggtttcatggaacctcacatcgttatgtgagtaaacgtgctgcggaaattatgggcaaaccgtacgatcagctcaagatcattaccgttcacgtgggtaacggcgcatcagttgcggcggtgaagaatggcgtatctgttgacacttccatgggtttcacaccacttgaaggtcttgtcatgggcacgcgcagcggcgatattgatccggccatcgtggaatttcttgagaaacgggaaggattgtcggccaaagaagtcgtcaacatcctcaacaagaaatctggtgtgtatgggctcaccaaaggctttagtagggacatgcgtgacattgtgctgaaggctattgaaggtgatcctgtatgccgccttgcattagatgtgtattattatcgtatcgcgaaatatattggcgcatacgctgcggccatgaacggtgttgacgcgatcgtctttaccgcaggagttggcgaaaatagcccgattatgcgcgaagaaattattgagaactacttgggctacttagggatcaagatcgataaagaagccaatgacttcaaaggtgaggagaagatcatttcaacgcccgattccaaagtgattgcgatggtagttccgaccaacgaggagctcatgatcgccaaagacacgaaagaaatcattgagaaagggttggacgagcttaagatc

SEQ ID NO: 1016 - protein, 417 aa, synthetic construct
  REGION 1..417: note = variant of acetate kinase from Marinitoga sp.38H-ov
MHHHHHHGGSGMKVLVINSGSSSIKYQLLDMTNEKVLAKGLVERIGIDGSRIVHKVNGEGHVLEHEIKNHEIGLKLVLDLLTDEKYGVLKDLKEIDAVGHRVVHGGERFASSVKITDEVLKTIETLSFLAPLHNPANIMGIKSSMKVLPGVPQVAVFDTAFHQKMPEKAYLYAIPYEYYEKYKIRRYGFHGTSHRYVSKRAAEIMGKPYDQLKIITVHVGNGASVAAVKNGVSVDTSMGFTPLEGLVMGTRSGDIDPAIVEFLEKREGLSAKEVVNILNKKSGVYGLTKGFSRDMRDIVLKAIEGDPVCRLALDVYYYRIAKYIGAYAAAMNGVDAIVFTAGVGENSPIMREEIIENYLGYLGIKIDKEANDFKGEEKIISTPDSKVIAMVVPTNEELMIAKDTKEIIEKGLDELKI

SEQ ID NO: 1017 - DNA, 1251 bp, synthetic construct
  misc_feature 1..1251: note = variant of acetate kinase from Marinitoga sp.38H-ov
  source 1..1251: mol_type = other DNA
atgcaccatcatcatcatcatggcggtagcggcatgaaagttctggtgattaattctggtagctcctccatcaaatatcagctcctcgatatgaccaacgaaaaggtattagcgaaaggcttggtcgagcgcattggcatcgacggttcgcgtatcgtgcataaagttaacggcgaagggcacgtgctggaacatgagattaaaaatcacgaaattggacttaaattggtcctggatcttcttacggacgaaaaatacggtgtgttgaaggatctcaaagaaatcgatgcagttgggcatcgcgtagtacatggcggcgagcgttttgccagtagcgtgaagattactgacgaattgttaaagaccatcgagacgttgtcgttcttagctccgttacacaatccagcgaacattatgggtatcaagagcagcatgaaagtgttaccgggtgtgcctcaagttgccgtctttgatacagcgttccaccagaagatgccggagaaagcctatttgtacgcaatcccctatgagtactacgagaaatataaaattcgccgctatgggtttcatggaacctcacatcgttatgtgagtaaacgtgctgcggaaattatgggcaaaccgtacgatcagctcaagatcattaccgttcacgtgggtaacggcgcatcagttgcggcggtgaagaatggcgtatctgttgacacttccatgggtttcacaccacttgaaggtcttgtcatgggcacgcgcagcggcgatattgatccggccatcgtggaatttcttgagaaagaagaaggattgtcggccaaagaagtcgtcaacatcctcaacaagaaatctggtgtgtatgggctcaccaaaggctttagtagggacatgcgtgacattgtgctgaaggctattgaaggtgatcctgtatgccgccttgcattagatgtgtattattatcgtatcgcgaaatatattggcgcatacgctgcggccatgaacggtgttgacgcgatcgtctttaccgcaggagttggcgaaaatagcccgattatgcgcgaagaaattattgagaactacttgggctacttagggatcaagatcgataaagaagccaatgacttcaaaggtgaggagaagatcatttcaacgcccgattccaaagtgattgcgatggtagttccgaccaacgaggagctcatgatcgccaaagacacgaaagaaatcattgagaaagggttggacgagcttaagatc

SEQ ID NO: 1018 - protein, 417 aa, synthetic construct
  REGION 1..417: note = variant of acetate kinase from Marinitoga sp.38H-ov
MHHHHHHGGSGMKVLVINSGSSSIKYQLLDMTNEKVLAKGLVERIGIDGSRIVHKVNGEGHVLEHEIKNHEIGLKLVLDLLTDEKYGVLKDLKEIDAVGHRVVHGGERFASSVKITDELLKTIETLSFLAPLHNPANIMGIKSSMKVLPGVPQVAVFDTAFHQKMPEKAYLYAIPYEYYEKYKIRRYGFHGTSHRYVSKRAAEIMGKPYDQLKIITVHVGNGASVAAVKNGVSVDTSMGFTPLEGLVMGTRSGDIDPAIVEFLEKEEGLSAKEVVNILNKKSGVYGLTKGFSRDMRDIVLKAIEGDPVCRLALDVYYYRIAKYIGAYAAAMNGVDAIVFTAGVGENSPIMREEIIENYLGYLGIKIDKEANDFKGEEKIISTPDSKVIAMVVPTNEELMIAKDTKEIIEKGLDELKI

SEQ ID NO: 1019 - DNA, 1251 bp, synthetic construct
  misc_feature 1..1251: note = variant of acetate kinase from Marinitoga sp.38H-ov
  source 1..1251: mol_type = other DNA
atgcaccatcatcatcatcatggcggtagcggcatgaaagttctggtgattaattctggtagctcctccatcaaatatcagctcctcgatatgaccaacgaaaaggtattagcgaaaggcttggtcgagcgcattggcatcgacggttcgcgtatcgtgcataaagttaacggcgaagggcacgtgctggaacatgagattaaaaatcacgaaattggacttaaattggtcctggatcttcttacggacgaaaaatacggtgtgttgaaggatctcaaagaaatcgatgcagttgggcatcgcgtagtacatggcggcgagcgttttgccagtagcgtggtgattactgacgaagtcttaaagaccatcgagacgttgtcgttcttagctccgttacacaatccagcgaacattatgggtatcaagagcagcatgaaagtgttaccgggtgtgcctcaagttgccgtctttgatacagcgttccaccagaagatgccggagaaagcctatttgtacgcaatcccctatgagtactacgagaaatataaaattcgccgctatgggtttcatggaacctcacatcgttatgtgagtaaacgtgctgcggaaattatgggcaaaccgtacgatcagctcaagatcattaccgttcacgtgggtaacggcgcatcagttgcggcggtgaagaatggcgtatctgttgacacttccatgggtttcacaccacttgaaggtcttgtcatgggcacgcgcagcggcgatattgatccggccatcgtggaatttcttgagaaagaagaaggattgtcggccaaagaagtcgtcaacatcctcaacaagaaatctggtgtgtatgggctcaccaaaggctttagtagggacatgcgtgacattgtgctgaaggctattgaaggtgatcctgtatgccgccttgcattagatgtgtattattatcgtatcgcgaaatatattggcgcatacgctgcggccatgaacggtgttgacgcgatcgtctttaccgcaggagttggcgaaaatagcccgattatgcgcgaagaaattattgagaactacttgggctacttagggatcaagatcgataaagaagccaatgacttcaaaggtgaggagaagatcatttcaacgcccgattccaaagtgattgcgatggtagttccgaccaacgaggagctcatgatcgccaaagacacgaaagaaatcattgagaaagggttggacgagcttaagatc

SEQ ID NO: 1020 - protein, 417 aa, synthetic construct
  REGION 1..417: note = variant of acetate kinase from Marinitoga sp.38H-ov
MHHHHHHGGSGMKVLVINSGSSSIKYQLLDMTNEKVLAKGLVERIGIDGSRIVHKVNGEGHVLEHEIKNHEIGLKLVLDLLTDEKYGVLKDLKEIDAVGHRVVHGGERFASSVVITDEVLKTIETLSFLAPLHNPANIMGIKSSMKVLPGVPQVAVFDTAFHQKMPEKAYLYAIPYEYYEKYKIRRYGFHGTSHRYVSKRAAEIMGKPYDQLKIITVHVGNGASVAAVKNGVSVDTSMGFTPLEGLVMGTRSGDIDPAIVEFLEKEEGLSAKEVVNILNKKSGVYGLTKGFSRDMRDIVLKAIEGDPVCRLALDVYYYRIAKYIGAYAAAMNGVDAIVFTAGVGENSPIMREEIIENYLGYLGIKIDKEANDFKGEEKIISTPDSKVIAMVVPTNEELMIAKDTKEIIEKGLDELKI

SEQ ID NO: 1021 - DNA, 1251 bp, synthetic construct
  misc_feature 1..1251: note = variant of acetate kinase from Marinitoga sp.38H-ov
  source 1..1251: mol_type = other DNA
atgcaccatcatcatcatcatggcggtagcggcatgaaagttctggtgattaattctggtagctcctccatcaaatatcagctcctcgatatgaccaacgaaaaggtattagcgaaaggcttggtcgagcgcattggcatcgacggttcgcgtatcgtgcataaagttaacggcgaagggcacgtgctggaacatgagattaaaaatcacgaaattggacttaaattggtcctggatcttcttacggacgaaaaatacggtgtgttgaaggatctcaaagaaatcgatgcagttgggcatcgcgtagtacatggcggcgagcgttttgccagtagcgtgaagattactgaccatgtcttaaagaccatcgagacgttgtcgttcttagctccgttacacaatccagcgaacattatgggtatcaagagcagcatgaaagtgttaccgggtgtgcctcaagttgccgtctttgatacagcgttccaccagaagatgccggagaaagcctatttgtacgcaatcccctatgagtactacgagaaatataaaattcgccgctatgggtttcatggaacctcacatcgttatgtgagtaaacgtgctgcggaaattatgggcaaaccgtacgatcagctcaagatcattaccgttcacgtgggtaacggcgcatcagttgcggcggtgaagaatggcgtatctgttgacacttccatgggtttcacaccacttgaaggtcttgtcatgggcacgcgcagcggcgatattgatccggccatcgtggaatttcttgagaaagaagaaggattgtcggccaaagaagtcgtcaacatcctcaacaagaaatctggtgtgtatgggctcaccaaaggctttagtagggacatgcgtgacattgtgctgaaggctattgaaggtgatcctgtatgccgccttgcattagatgtgtattattatcgtatcgcgaaatatattggcgcatacgctgcggccatgaacggtgttgacgcgatcgtctttaccgcaggagttggcgaaaatagcccgattatgcgcgaagaaattattgagaactacttgggctacttagggatcaagatcgataaagaagccaatgacttcaaaggtgaggagaagatcatttcaacgcccgattccaaagtgattgcgatggtagttccgaccaacgaggagctcatgatcgccaaagacacgaaagaaatcattgagaaagggttggacgagcttaagatc

SEQ ID NO: 1022 - protein, 417 aa, synthetic construct
  REGION 1..417: note = variant of acetate kinase from Marinitoga sp.38H-ov
MHHHHHHGGSGMKVLVINSGSSSIKYQLLDMTNEKVLAKGLVERIGIDGSRIVHKVNGEGHVLEHEIKNHEIGLKLVLDLLTDEKYGVLKDLKEIDAVGHRVVHGGERFASSVKITDHVLKTIETLSFLAPLHNPANIMGIKSSMKVLPGVPQVAVFDTAFHQKMPEKAYLYAIPYEYYEKYKIRRYGFHGTSHRYVSKRAAEIMGKPYDQLKIITVHVGNGASVAAVKNGVSVDTSMGFTPLEGLVMGTRSGDIDPAIVEFLEKEEGLSAKEVVNILNKKSGVYGLTKGFSRDMRDIVLKAIEGDPVCRLALDVYYYRIAKYIGAYAAAMNGVDAIVFTAGVGENSPIMREEIIENYLGYLGIKIDKEANDFKGEEKIISTPDSKVIAMVVPTNEELMIAKDTKEIIEKGLDELKI

SEQ ID NO: 1023 - DNA, 1251 bp, synthetic construct
  misc_feature 1..1251: note = variant of acetate kinase from Marinitoga sp.38H-ov
  source 1..1251: mol_type = other DNA
atgcaccatcatcatcatcatggcggtagcggcatgaaagttctggtgattaattctggtagctcctccatcaaatatcagctcctcgatatgaccaacgaaaaggtattagcgaaaggcttggtcgagcgcattggcatcgacggttcgcgtatcgtgcataaagttaacggcgaagggcacgtgctggaacatgagattaaaaatcacgaaattggacttaaattggtcctggatcttcttacggacgaaaaatacggtgtgttgaaggatctcaaagaaatcgatgcagttgggcatcgcgtagtacatggcggcgagcgttttgccagtagcgtgaagattactgacgaagtcttaaagaccatcgagacgttgtcgttcttagctccgttacacaatccagcgaacattatgggtatcaagagcagcatgaaagtgttaccgggtgtgcctcaagttgccgtctttgatacagcgttccaccagaagatgccggagaaagcctatttgtacgcaatcccctatgagtactacgagaaatataaaattcgccgctatgggtttcatggaacctcacatcgttatgtgagtaaacgtgctgcggaaattatgggcaaaccgtacgatgttctcaagatcattaccgttcacgtgggtaacggcgcatcagttgcggcggtgaagaatggcgtatctgttgacacttccatgggtttcacaccacttgaaggtcttgtcatgggcacgcgcagcggcgatattgatccggccatcgtggaatttcttgagaaagaagaaggattgtcggccaaagaagtcgtcaacatcctcaacaagaaatctggtgtgtatgggctcaccaaaggctttagtagggacatgcgtgacattgtgctgaaggctattgaaggtgatcctgtatgccgccttgcattagatgtgtattattatcgtatcgcgaaatatattggcgcatacgctgcggccatgaacggtgttgacgcgatcgtctttaccgcaggagttggcgaaaatagcccgattatgcgcgaagaaattattgagaactacttgggctacttagggatcaagatcgataaagaagccaatgacttcaaaggtgaggagaagatcatttcaacgcccgattccaaagtgattgcgatggtagttccgaccaacgaggagctcatgatcgccaaagacacgaaagaaatcattgagaaagggttggacgagcttaagatc

SEQ ID NO: 1024 - protein, 417 aa, synthetic construct
  REGION 1..417: note = variant of acetate kinase from Marinitoga sp.38H-ov
MHHHHHHGGSGMKVLVINSGSSSIKYQLLDMTNEKVLAKGLVERIGIDGSRIVHKVNGEGHVLEHEIKNHEIGLKLVLDLLTDEKYGVLKDLKEIDAVGHRVVHGGERFASSVKITDEVLKTIETLSFLAPLHNPANIMGIKSSMKVLPGVPQVAVFDTAFHQKMPEKAYLYAIPYEYYEKYKIRRYGFHGTSHRYVSKRAAEIMGKPYDVLKIITVHVGNGASVAAVKNGVSVDTSMGFTPLEGLVMGTRSGDIDPAIVEFLEKEEGLSAKEVVNILNKKSGVYGLTKGFSRDMRDIVLKAIEGDPVCRLALDVYYYRIAKYIGAYAAAMNGVDAIVFTAGVGENSPIMREEIIENYLGYLGIKIDKEANDFKGEEKIISTPDSKVIAMVVPTNEELMIAKDTKEIIEKGLDELKI

SEQ ID NO: 1025 - DNA, 1251 bp, synthetic construct
  misc_feature 1..1251: note = variant of acetate kinase from Marinitoga sp.38H-ov
  source 1..1251: mol_type = other DNA
atgcaccatcatcatcatcatggcggtagcggcatgaaagttctggtgattaattctggtagctcctccatcaaatatcagctcctcgatatgaccaacgaaaaggtattagcgaaaggcttggtcgagcgcattggcatcgacggttcgcgtatcgtgcataaagttaacggcgaagggcacgtgctggaacatgagattaaaaatcacgaaattggacttaaattggtcctggatcttcttacggacgaaaaatacggtgtgttgaaggatctcaaagaaatcgatgcagttgggcatcgcgtagtacatggcggcgagcgttttgccagtagcgtgaagattactgacgaagtcttaaagaccatcgagacgttgtcgttcttagctccgttacacaatccagcgaacattatgggtatcaagagcagcatgaaagtgttaccgggtgtgcctcaagttgccgtctttgatacagcgttccaccagaagatgccggagaaagcctatttgtacgcaatcccctatgagtactacgagaaatataaaattcgccgctatgggtttcatggaacctcacatcgttatgtgagtaaacgtgctgcggaaattatgggcaaaccgtacgatcagctcaagatcattaccgttcacgtgggtaacggcgcatcagttgcggcggtgaagaatggcgtatctgttgacacttccatgggtttcacaccacttgaaggtcttgtcatgggcacgcgcagcggcgatattgatccggccatcgtggaatttcttgagaaagaagaaggattgtcggccaaagaagtcgtcaacatcctcaacaagaaatctggtgtgtatgggctcaccaaaggctttagtagggacatgcgtgacattgtgctgaaggctattgaaggtgatcctgtatgccgccttgcattagatgtgtattattatcgtatcgcgaaatatattggcgcatacgctgcggccatgaacggtgttgacgcgatcgtctttaccgcaggagttggcgaaaatagcccgattatgcgcgaagaaattattgagaacgggttgggctacttagggatcaagatcgataaagaagccaatgacttcaaaggtgaggagaagatcatttcaacgcccgattccaaagtgattgcgatggtagttccgaccaacgaggagctcatgatcgccaaagacacgaaagaaatcattgagaaagggttggacgagcttaagatc

SEQ ID NO: 1026 - protein, 417 aa, synthetic construct
  REGION 1..417: note = variant of acetate kinase from Marinitoga sp.38H-ov
MHHHHHHGGSGMKVLVINSGSSSIKYQLLDMTNEKVLAKGLVERIGIDGSRIVHKVNGEGHVLEHEIKNHEIGLKLVLDLLTDEKYGVLKDLKEIDAVGHRVVHGGERFASSVKITDEVLKTIETLSFLAPLHNPANIMGIKSSMKVLPGVPQVAVFDTAFHQKMPEKAYLYAIPYEYYEKYKIRRYGFHGTSHRYVSKRAAEIMGKPYDQLKIITVHVGNGASVAAVKNGVSVDTSMGFTPLEGLVMGTRSGDIDPAIVEFLEKEEGLSAKEVVNILNKKSGVYGLTKGFSRDMRDIVLKAIEGDPVCRLALDVYYYRIAKYIGAYAAAMNGVDAIVFTAGVGENSPIMREEIIENGLGYLGIKIDKEANDFKGEEKIISTPDSKVIAMVVPTNEELMIAKDTKEIIEKGLDELKI

SEQ ID NO: 1027 - DNA, 1251 bp, synthetic construct
  misc_feature 1..1251: note = variant of acetate kinase from Marinitoga sp.38H-ov
  source 1..1251: mol_type = other DNA
atgcaccatcatcatcatcatggcggtagcggcatgaaagttctggtgattaattctggtagctcctccatcaaatatcagctcctcgatatgaccaacgaaaaggtattagcgaaaggcttggtcgagcgcattggcatcgacggttcgcgtatcgtgcataaagttaacggcgaagggcacgtgctggaacatgagattaaaaatcacgaaattggacttaaattggtcctggatcttcttacggacgaaaaatacggtgtgttgaaggatctcaaagaaatcgatgcagttgggcatcgcgtagtacatggcggcgagcgttttgccagtagcgtgacgattactgacgaagtcttaaagaccatcgagacgttgtcgttcttagctccgttacacaatccagcgaacattatgggtatcaagagcagcatgaaagtgttaccgggtgtgcctcaagttgccgtctttgatacagcgttccaccagaagatgccggagaaagcctatttgtacgcaatcccctatgagtactacgagaaatataaaattcgccgctatgggtttcatggaacctcacatcgttatgtgagtaaacgtgctgcggaaattatgggcaaaccgtacgatcagctcaagatcattaccgttcacgtgggtaacggcgcatcagttgcggcggtgaagaatggcgtatctgttgacacttccatgggtttcacaccacttgaaggtcttgtcatgggcacgcgcagcggcgatattgatccggccatcgtggaatttcttgagaaagaagaaggattgtcggccaaagaagtcgtcaacatcctcaacaagaaatctggtgtgtatgggctcaccaaaggctttagtagggacatgcgtgacattgtgctgaaggctattgaaggtgatcctgtatgccgccttgcattagatgtgtattattatcgtatcgcgaaatatattggcgcatacgctgcggccatgaacggtgttgacgcgatcgtctttaccgcaggagttggcgaaaatagcccgattatgcgcgaagaaattattgagaactacttgggctacttagggatcaagatcgataaagaagccaatgacttcaaaggtgaggagaagatcatttcaacgcccgattccaaagtgattgcgatggtagttccgaccaacgaggagctcatgatcgccaaagacacgaaagaaatcattgagaaagggttggacgagcttaagatc

SEQ ID NO: 1028 - protein, 417 aa, synthetic construct
  REGION 1..417: note = variant of acetate kinase from Marinitoga sp.38H-ov
MHHHHHHGGSGMKVLVINSGSSSIKYQLLDMTNEKVLAKGLVERIGIDGSRIVHKVNGEGHVLEHEIKNHEIGLKLVLDLLTDEKYGVLKDLKEIDAVGHRVVHGGERFASSVTITDEVLKTIETLSFLAPLHNPANIMGIKSSMKVLPGVPQVAVFDTAFHQKMPEKAYLYAIPYEYYEKYKIRRYGFHGTSHRYVSKRAAEIMGKPYDQLKIITVHVGNGASVAAVKNGVSVDTSMGFTPLEGLVMGTRSGDIDPAIVEFLEKEEGLSAKEVVNILNKKSGVYGLTKGFSRDMRDIVLKAIEGDPVCRLALDVYYYRIAKYIGAYAAAMNGVDAIVFTAGVGENSPIMREEIIENYLGYLGIKIDKEANDFKGEEKIISTPDSKVIAMVVPTNEELMIAKDTKEIIEKGLDELKI

SEQ ID NO: 1029 - DNA, 1251 bp, synthetic construct
  misc_feature 1..1251: note = variant of acetate kinase from Marinitoga sp.38H-ov
  source 1..1251: mol_type = other DNA
atgcaccatcatcatcatcatggcggtagcggcatgaaagttctggtgattaattctggtagctcctccatcaaatatcagctcctcgatatgaccaacgaaaaggtattagcgaaaggcttggtcgagcgcattggcatcgacggttcgcgtatcgtgccgaaagttaacggcgaagggcacgtgctggaacatgagattaaaaatcacgaaattggacttaaattggtcctggatcttcttacggacgaaaaatacggtgtgttgaaggatctcaaagaaatcgatgcagttgggcatcgcgtagtacatggcggcgagcgttttgccagtagcgtgaagattactgacgaagtcttaaagaccatcgagacgttgtcgttcttagctccgttacacaatccagcgaacattatgggtatcaagagcagcatgaaagtgttaccgggtgtgcctcaagttgccgtctttgatacagcgttccaccagaagatgccggagaaagcctatttgtacgcaatcccctatgagtactacgagaaatataaaattcgccgctatgggtttcatggaacctcacatcgttatgtgagtaaacgtgctgcggaaattatgggcaaaccgtacgatcagctcaagatcattaccgttcacgtgggtaacggcgcatcagttgcggcggtgaagaatggcgtatctgttgacacttccatgggtttcacaccacttgaaggtcttgtcatgggcacgcgcagcggcgatattgatccggccatcgtggaatttcttgagaaagaagaaggattgtcggccaaagaagtcgtcaacatcctcaacaagaaatctggtgtgtatgggctcaccaaaggctttagtagggacatgcgtgacattgtgctgaaggctattgaaggtgatcctgtatgccgccttgcattagatgtgtattattatcgtatcgcgaaatatattggcgcatacgctgcggccatgaacggtgttgacgcgatcgtctttaccgcaggagttggcgaaaatagcccgattatgcgcgaagaaattattgagaactacttgggctacttagggatcaagatcgataaagaagccaatgacttcaaaggtgaggagaagatcatttcaacgcccgattccaaagtgattgcgatggtagttccgaccaacgaggagctcatgatcgccaaagacacgaaagaaatcattgagaaagggttggacgagcttaagatc

SEQ ID NO: 1030 - protein, 417 aa, synthetic construct
  REGION 1..417: note = variant of acetate kinase from Marinitoga sp.38H-ov
MHHHHHHGGSGMKVLVINSGSSSIKYQLLDMTNEKVLAKGLVERIGIDGSRIVPKVNGEGHVLEHEIKNHEIGLKLVLDLLTDEKYGVLKDLKEIDAVGHRVVHGGERFASSVKITDEVLKTIETLSFLAPLHNPANIMGIKSSMKVLPGVPQVAVFDTAFHQKMPEKAYLYAIPYEYYEKYKIRRYGFHGTSHRYVSKRAAEIMGKPYDQLKIITVHVGNGASVAAVKNGVSVDTSMGFTPLEGLVMGTRSGDIDPAIVEFLEKEEGLSAKEVVNILNKKSGVYGLTKGFSRDMRDIVLKAIEGDPVCRLALDVYYYRIAKYIGAYAAAMNGVDAIVFTAGVGENSPIMREEIIENYLGYLGIKIDKEANDFKGEEKIISTPDSKVIAMVVPTNEELMIAKDTKEIIEKGLDELKI

SEQ ID NO: 1031 - DNA, 1251 bp, synthetic construct
  misc_feature 1..1251: note = variant of acetate kinase from Marinitoga sp.38H-ov
  source 1..1251: mol_type = other DNA
atgcaccatcatcatcatcatggcggtagcggcatgaaagttctggtgattaattctggtagctcctccatcaaatatcagctcctcgatatgaccaacgaaaaggtattagcgaaaggcttggtcgagcgcattggcatcgacggttcgcgtatcgtgcataaagttaacggcgaagggcacgtgctggaacatgagattaaaaatcacgaaattggacttaaattggtcctggatcttcttacggacgaaaaatacggtgtgttgaaggatctcaaagaaatcgatgcagttgggcatcgcgtagtacatggcggcgagcgttttgccagtagcgtgaagattactgacgaagtcttagggaccatcgagacgttgtcgttcttagctccgttacacaatccagcgaacattatgggtatcaagagcagcatgaaagtgttaccgggtgtgcctcaagttgccgtctttgatacagcgttccaccagaagatgccggagaaagcctatttgtacgcaatcccctatgagtactacgagaaatataaaattcgccgctatgggtttcatggaacctcacatcgttatgtgagtaaacgtgctgcggaaattatgggcaaaccgtacgatcagctcaagatcattaccgttcacgtgggtaacggcgcatcagttgcggcggtgaagaatggcgtatctgttgacacttccatgggtttcacaccacttgaaggtcttgtcatgggcacgcgcagcggcgatattgatccggccatcgtggaatttcttgagaaagaagaaggattgtcggccaaagaagtcgtcaacatcctcaacaagaaatctggtgtgtatgggctcaccaaaggctttagtagggacatgcgtgacattgtgctgaaggctattgaaggtgatcctgtatgccgccttgcattagatgtgtattattatcgtatcgcgaaatatattggcgcatacgctgcggccatgaacggtgttgacgcgatcgtctttaccgcaggagttggcgaaaatagcccgattatgcgcgaagaaattattgagaactacttgggctacttagggatcaagatcgataaagaagccaatgacttcaaaggtgaggagaagatcatttcaacgcccgattccaaagtgattgcgatggtagttccgaccaacgaggagctcatgatcgccaaagacacgaaagaaatcattgagaaagggttggacgagcttaagatc

SEQ ID NO: 1032 - protein, 417 aa, synthetic construct
  REGION 1..417: note = variant of acetate kinase from Marinitoga sp.38H-ov
MHHHHHHGGSGMKVLVINSGSSSIKYQLLDMTNEKVLAKGLVERIGIDGSRIVHKVNGEGHVLEHEIKNHEIGLKLVLDLLTDEKYGVLKDLKEIDAVGHRVVHGGERFASSVKITDEVLGTIETLSFLAPLHNPANIMGIKSSMKVLPGVPQVAVFDTAFHQKMPEKAYLYAIPYEYYEKYKIRRYGFHGTSHRYVSKRAAEIMGKPYDQLKIITVHVGNGASVAAVKNGVSVDTSMGFTPLEGLVMGTRSGDIDPAIVEFLEKEEGLSAKEVVNILNKKSGVYGLTKGFSRDMRDIVLKAIEGDPVCRLALDVYYYRIAKYIGAYAAAMNGVDAIVFTAGVGENSPIMREEIIENYLGYLGIKIDKEANDFKGEEKIISTPDSKVIAMVVPTNEELMIAKDTKEIIEKGLDELKI

SEQ ID NO: 1033 - DNA, 1251 bp, synthetic construct
  misc_feature 1..1251: note = variant of acetate kinase from Marinitoga sp.38H-ov
  source 1..1251: mol_type = other DNA
atgcaccatcatcatcatcatggcggtagcggcatgaaagttctggtgattaattctggtagctcctccatcaaatatcagctcctcgatatgaccaacgaaaaggtattagcgaaaggcttggtcgagcgcattggcatcgacggttcgcgtatcgtgcataaagttaacggcgaagggcacgtgctggaacatgagattaaaaatcacgaaattggacttaaattggtcctggatcttcttacggacgaaaaatacggtgtgttgaaggatctcaaagaaatcgatgcagttgggcatcgcgtagtacatggcggcgagcgttttgccagtagcgtgaagattactgacgaagtcttaaagaccatcgagacgttgtcgttcttagctccgttacacaatccagcgaacattatgggtatcaagagcagcatgaaagtgttaccgggtgtgcctcaagttgccgtctttgatacagcgttccaccagaagatgccggagaaagcctatttgtacgcaatcccctatgagtactacgagaaatataaaattcgccgctatgggtttcatggaacctcacatcgttatgtgagtaaacgtgctgcggaaattatgggcaaaccgtacgatcagctcaagatcattaccgttcacgtgggtaacggcgcatcagttgcggcggtgaagaatggcgtatctgttgacacttccatgggtttcacaccacttgaaggtcttgtcatgggcacgcgcagcggcgatattgatccggccatcgtggaatttcttgagaaagaagaaggattgtcggccaaagaagtcgtcaactcgctcaacaagaaatctggtgtgtatgggctcaccaaaggctttagtagggacatgcgtgacattgtgctgaaggctattgaaggtgatcctgtatgccgccttgcattagatgtgtattattatcgtatcgcgaaatatattggcgcatacgctgcggccatgaacggtgttgacgcgatcgtctttaccgcaggagttggcgaaaatagcccgattatgcgcgaagaaattattgagaactacttgggctacttagggatcaagatcgataaagaagccaatgacttcaaaggtgaggagaagatcatttcaacgcccgattccaaagtgattgcgatggtagttccgaccaacgaggagctcatgatcgccaaagacacgaaagaaatcattgagaaagggttggacgagcttaagatc

SEQ ID NO: 1034 - protein, 417 aa, synthetic construct
  REGION 1..417: note = variant of acetate kinase from Marinitoga sp.38H-ov
MHHHHHHGGSGMKVLVINSGSSSIKYQLLDMTNEKVLAKGLVERIGIDGSRIVHKVNGEGHVLEHEIKNHEIGLKLVLDLLTDEKYGVLKDLKEIDAVGHRVVHGGERFASSVKITDEVLKTIETLSFLAPLHNPANIMGIKSSMKVLPGVPQVAVFDTAFHQKMPEKAYLYAIPYEYYEKYKIRRYGFHGTSHRYVSKRAAEIMGKPYDQLKIITVHVGNGASVAAVKNGVSVDTSMGFTPLEGLVMGTRSGDIDPAIVEFLEKEEGLSAKEVVNSLNKKSGVYGLTKGFSRDMRDIVLKAIEGDPVCRLALDVYYYRIAKYIGAYAAAMNGVDAIVFTAGVGENSPIMREEIIENYLGYLGIKIDKEANDFKGEEKIISTPDSKVIAMVVPTNEELMIAKDTKEIIEKGLDELKI

SEQ ID NO: 1035 - DNA, 1251 bp, synthetic construct
  misc_feature 1..1251: note = variant of acetate kinase from Marinitoga sp.38H-ov
  source 1..1251: mol_type = other DNA
atgcaccatcatcatcatcatggcggtagcggcatgaaagttctggtgattaattctggtagctcctccatcaaatatcagctcctcgatatgaccaacgaaaaggtattagcgaaaggcttggtcgagcgcattggcatcgacggttcgcgtatcgtgcataaagttaacggcgaagggcacgtgctggaacatgagattaaaaatcacgaaattggacttaaattggtcctggatcttcttacggacgaaaaatacggtgtgttgaaggatctcaaagaaatcgatgcagttgggcatcgcgtagtacatggcggcgagcgttttgccagtagcgtgaagattactgacgaagtcttaaagaccatcgagacgttgtcgttcttagctccgttacacaatccagcgaacattatgggtatcaagagcagcatgaaagtgttaccgggtgtgcctcaagttgccgtctttgatacagcgttccaccagaagatgccggagaaagcctatttgtacgcaatcccctatgagtactacgagaaatataaaattcgccgctatgggtttcatggaacctcacatcgttatgtgagtaaacgtgctgcggaaattatgggcaaaccgtacgatcagctcaagatcattaccgttcacgtgggtaacggcgcatcagttgcggcggtgaagaatggcgtatctgttgacacttccatgggtttcacaccacttgaaggtcttgtcatgggcacgcgcagcggcgatattgatccggccatcgtggaatttcttgagcttgaagaaggattgtcggccaaagaagtcgtcaacatcctcaacaagaaatctggtgtgtatgggctcaccaaaggctttagtagggacatgcgtgacattgtgctgaaggctattgaaggtgatcctgtatgccgccttgcattagatgtgtattattatcgtatcgcgaaatatattggcgcatacgctgcggccatgaacggtgttgacgcgatcgtctttaccgcaggagttggcgaaaatagcccgattatgcgcgaagaaattattgagaactacttgggctacttagggatcaagatcgataaagaagccaatgacttcaaaggtgaggagaagatcatttcaacgcccgattccaaagtgattgcgatggtagttccgaccaacgaggagctcatgatcgccaaagacacgaaagaaatcattgagaaagggttggacgagcttaagatc

SEQ ID NO: 1036 - protein, 417 aa, synthetic construct
  REGION 1..417: note = variant of acetate kinase from Marinitoga sp.38H-ov
MHHHHHHGGSGMKVLVINSGSSSIKYQLLDMTNEKVLAKGLVERIGIDGSRIVHKVNGEGHVLEHEIKNHEIGLKLVLDLLTDEKYGVLKDLKEIDAVGHRVVHGGERFASSVKITDEVLKTIETLSFLAPLHNPANIMGIKSSMKVLPGVPQVAVFDTAFHQKMPEKAYLYAIPYEYYEKYKIRRYGFHGTSHRYVSKRAAEIMGKPYDQLKIITVHVGNGASVAAVKNGVSVDTSMGFTPLEGLVMGTRSGDIDPAIVEFLELEEGLSAKEVVNILNKKSGVYGLTKGFSRDMRDIVLKAIEGDPVCRLALDVYYYRIAKYIGAYAAAMNGVDAIVFTAGVGENSPIMREEIIENYLGYLGIKIDKEANDFKGEEKIISTPDSKVIAMVVPTNEELMIAKDTKEIIEKGLDELKI

SEQ ID NO: 1037 - DNA, 1251 bp, synthetic construct
  misc_feature 1..1251: note = variant of acetate kinase from Marinitoga sp.38H-ov
  source 1..1251: mol_type = other DNA
atgcaccatcatcatcatcatggcggtagcggcatgaaagttctggtgattaattctggtagctcctccatcaaatatcagctcctcgatatgaccaacgaaaaggtattagcgaaaggcttggtcgagcgcattggcatcgacggttcgcgtatcgtgcataaagttaacggcgaagggcacgtgctggaacatgagattaaaaatcacgaaattggacttaaattggtcctggatcttcttacggacgaaaaatacggtgtgttgaaggatctcaaagaaatcgatgcagttgggcatcgcgtagtacatggcggcgagcgttttgccagtagcgtgaagattactgacgaagtcttaaagaccatcgagacgttgtcgttcttagctccgttacacaatccagcgaacattatgggtatcaagagcagcatgaaagtgttaccgggtgtgcctcaagttgccgtctttgatacagcgttccaccagaagatgccggagaaagcctatttgtacgcaatcccctatgagtactacgagaaatataaaattcgccgctatgggtttcatggaacctcacatcgttatgtgagtaaacgtgctgcggaaattatgggcaaaccgtacgatcagctcaagatcattaccgttcacgtgggtaacggcgcatcagttgcggcggtgaagaatggcgtatctgttgacacttccatgggtttcacaccacttgaaggtcttgtcatgggcacgcgcagcggcgatattgatccggccatcgtggaatttcttgagaaagaagaaggattgtcggccaaagaagtcgtcaacatcctcaacaagaaatctggtgtgtatgggctcaccaaaggctttagtagggacatgcgtgacattgtgctgaaggctattgaaggtaggcctgtatgccgccttgcattagatgtgtattattatcgtatcgcgaaatatattggcgcatacgctgcggccatgaacggtgttgacgcgatcgtctttaccgcaggagttggcgaaaatagcccgattatgcgcgaagaaattattgagaactacttgggctacttagggatcaagatcgataaagaagccaatgacttcaaaggtgaggagaagatcatttcaacgcccgattccaaagtgattgcgatggtagttccgaccaacgaggagctcatgatcgccaaagacacgaaagaaatcattgagaaagggttggacgagcttaagatc

SEQ ID NO: 1038 - protein, 417 aa, synthetic construct
  REGION 1..417: note = variant of acetate kinase from Marinitoga sp.38H-ov
MHHHHHHGGSGMKVLVINSGSSSIKYQLLDMTNEKVLAKGLVERIGIDGSRIVHKVNGEGHVLEHEIKNHEIGLKLVLDLLTDEKYGVLKDLKEIDAVGHRVVHGGERFASSVKITDEVLKTIETLSFLAPLHNPANIMGIKSSMKVLPGVPQVAVFDTAFHQKMPEKAYLYAIPYEYYEKYKIRRYGFHGTSHRYVSKRAAEIMGKPYDQLKIITVHVGNGASVAAVKNGVSVDTSMGFTPLEGLVMGTRSGDIDPAIVEFLEKEEGLSAKEVVNILNKKSGVYGLTKGFSRDMRDIVLKAIEGRPVCRLALDVYYYRIAKYIGAYAAAMNGVDAIVFTAGVGENSPIMREEIIENYLGYLGIKIDKEANDFKGEEKIISTPDSKVIAMVVPTNEELMIAKDTKEIIEKGLDELKI

SEQ ID NO: 1039 - DNA, 1251 bp, synthetic construct
  misc_feature 1..1251: note = variant of acetate kinase from Marinitoga sp.38H-ov
  source 1..1251: mol_type = other DNA
atgcaccatcatcatcatcatggcggtagcggcatgaaagttctggtgattaattctggtagctcctccatcaaatatcagctcctcgatatgaccaacgaaaaggtattagcgaaaggcttggtcgagcgcattggcatcgacggttcgcgtatcgtgcataaagttaacggcgaagggcacgtgctggaacatgagattaaaaatcacgaaattggacttaaattggtcctggatcttcttacggacgaaaaatacggtgtgttgaaggatctcaaagaaatcgatgcagttgggcatcgcgtagtacatggcggcgagcgttttgccagtagcgtgaagattactgacgaagtcttaaagaccatcgagacgttgtcgttcttagctccgttacacaatccagcgaacattatgggtatcaagagcagcatgaaagtgttaccgggtgtgcctcaagttgccgtctttgatacagcgttccaccagaagatgccggagaaagcctatttgtacgcaatcccctatgagtactacgagaaatataaaattcgccgctatgggtttcatggaacctcacatcgttatgtgagtaaacgtgctgcggaaattatgggcaaaccgtacgatcagctcaagatcattaccgttcacgtgggtaacggcgcatcagttgcggcggtgaagaatggcgtatctgttgacacttccatgggtttcacaccacttgaaggtcttgtcatgggcacgcgcagcggcgatattgatccggccatcgtggaatttcttgagaaagaagaaggattgtcggccaaagaagtcgtcaacatcctcaacaagaaatctggtgtgtatgggctcaccaaaggctttagtagggacatgcgtgacattgtgctgaaggctattgaaggtgatcctgtatgccgccttgcattagatgtgtattatccgcgtatcgcgaaatatattggcgcatacgctgcggccatgaacggtgttgacgcgatcgtctttaccgcaggagttggcgaaaatagcccgattatgcgcgaagaaattattgagaactacttgggctacttagggatcaagatcgataaagaagccaatgacttcaaaggtgaggagaagatcatttcaacgcccgattccaaagtgattgcgatggtagttccgaccaacgaggagctcatgatcgccaaagacacgaaagaaatcattgagaaagggttggacgagcttaagatc

SEQ ID NO: 1040 - protein, 417 aa, synthetic construct
  REGION 1..417: note = variant of acetate kinase from Marinitoga sp.38H-ov
MHHHHHHGGSGMKVLVINSGSSSIKYQLLDMTNEKVLAKGLVERIGIDGSRIVHKVNGEGHVLEHEIKNHEIGLKLVLDLLTDEKYGVLKDLKEIDAVGHRVVHGGERFASSVKITDEVLKTIETLSFLAPLHNPANIMGIKSSMKVLPGVPQVAVFDTAFHQKMPEKAYLYAIPYEYYEKYKIRRYGFHGTSHRYVSKRAAEIMGKPYDQLKIITVHVGNGASVAAVKNGVSVDTSMGFTPLEGLVMGTRSGDIDPAIVEFLEKEEGLSAKEVVNILNKKSGVYGLTKGFSRDMRDIVLKAIEGDPVCRLALDVYYPRIAKYIGAYAAAMNGVDAIVFTAGVGENSPIMREEIIENYLGYLGIKIDKEANDFKGEEKIISTPDSKVIAMVVPTNEELMIAKDTKEIIEKGLDELKI

SEQ ID NO: 1041 - DNA, 1251 bp, synthetic construct
  misc_feature 1..1251: note = variant of acetate kinase from Marinitoga sp.38H-ov
  source 1..1251: mol_type = other DNA
atgcaccatcatcatcatcatggcggtagcggcatgaaagttctggtgattaattctggtagctcctccatcaaatatcagtggctcgatatgaccaacgaaaaggtattagcgaaaggcttggtcgagcgcattggcatcgacggttcgcgtatcgtgcataaagttaacggcgaagggcacgtgctggaacatgagattaaaaatcacgaaattggacttaaattggtcctggatcttcttacggacgaaaaatacggtgtgttgaaggatctcaaagaaatcgatgcagttgggcatcgcgtagtacatggcggcgagcgttttgccagtagcgtgaagattactgacgaagtcttaaagaccatcgagacgttgtcgttcttagctccgttacacaatccagcgaacattatgggtatcaagagcagcatgaaagtgttaccgggtgtgcctcaagttgccgtctttgatacagcgttccaccagaagatgccggagaaagcctatttgtacgcaatcccctatgagtactacgagaaatataaaattcgccgctatgggtttcatggaacctcacatcgttatgtgagtaaacgtgctgcggaaattatgggcaaaccgtacgatcagctcaagatcattaccgttcacgtgggtaacggcgcatcagttgcggcggtgaagaatggcgtatctgttgacacttccatgggtttcacaccacttgaaggtcttgtcatgggcacgcgcagcggcgatattgatccggccatcgtggaatttcttgagaaagaagaaggattgtcggccaaagaagtcgtcaacatcctcaacaagaaatctggtgtgtatgggctcaccaaaggctttagtagggacatgcgtgacattgtgctgaaggctattgaaggtgatcctgtatgccgccttgcattagatgtgtattattatcgtatcgcgaaatatattggcgcatacgctgcggccatgaacggtgttgacgcgatcgtctttaccgcaggagttggcgaaaatagcccgattatgcgcgaagaaattattgagaactacttgggctacttagggatcaagatcgataaagaagccaatgacttcaaaggtgaggagaagatcatttcaacgcccgattccaaagtgattgcgatggtagttccgaccaacgaggagctcatgatcgccaaagacacgaaagaaatcattgagaaagggttggacgagcttaagatc

SEQ ID NO: 1042 - protein, 417 aa, synthetic construct
  REGION 1..417: note = variant of acetate kinase from Marinitoga sp.38H-ov
MHHHHHHGGSGMKVLVINSGSSSIKYQWLDMTNEKVLAKGLVERIGIDGSRIVHKVNGEGHVLEHEIKNHEIGLKLVLDLLTDEKYGVLKDLKEIDAVGHRVVHGGERFASSVKITDEVLKTIETLSFLAPLHNPANIMGIKSSMKVLPGVPQVAVFDTAFHQKMPEKAYLYAIPYEYYEKYKIRRYGFHGTSHRYVSKRAAEIMGKPYDQLKIITVHVGNGASVAAVKNGVSVDTSMGFTPLEGLVMGTRSGDIDPAIVEFLEKEEGLSAKEVVNILNKKSGVYGLTKGFSRDMRDIVLKAIEGDPVCRLALDVYYYRIAKYIGAYAAAMNGVDAIVFTAGVGENSPIMREEIIENYLGYLGIKIDKEANDFKGEEKIISTPDSKVIAMVVPTNEELMIAKDTKEIIEKGLDELKI

SEQ ID NO: 1043 - DNA, 1251 bp, synthetic construct
  misc_feature 1..1251: note = variant of acetate kinase from Marinitoga sp.38H-ov
  source 1..1251: mol_type = other DNA
atgcaccatcatcatcatcatggcggtagcggcatgaaagttctggtgattaattctggtagctcctccatcaaatatcagctcctcgatatgaccaacgaaaaggtattagcgaaaggcttggtcgagcgcattggcatcgacggttcgcgtatcgtgcataaagttaacggcgaagggcacgtgctggaacatgagattaaaaatcacgaaattggacttaaattggtcctggatcttcttacggacgaaaaatacggtgtgttgaaggatctcaaagaaatcgatgcagttgggcatcgcgtagtacatggcggcgagcgttttgccagtagcgtgaagattactgacgaagtcttaaagaccatcgagacgttgtcgttcttagctccgttacacaatccagcgaacattatgggtatcaagagcagcatgaaagtgttaccgggtgtgcctcaagttgccgtctttgatacagcgttccaccagaagatgccggagaaagcctatttgtacgcaatcccctatgagtactacgagaaatataaaattcgccgctatgggtttcatggaacctcacatcgttatgtgagtaaacgtgctgcggaaattatgggcaaaccgtacgatcagctcaagatcattaccgttcacgtgggtaacggcgcatcagttgcggcggtgaagaatggcgtatctgttgacacttccatgggtttcacaccacttgaaggtcttgtcatgggcacgcgcagcggcgatattgattgggccatcgtggaatttcttgagaaagaagaaggattgtcggccaaagaagtcgtcaacatcctcaacaagaaatctggtgtgtatgggctcaccaaaggctttagtagggacatgcgtgacattgtgctgaaggctattgaaggtgatcctgtatgccgccttgcattagatgtgtattattatcgtatcgcgaaatatattggcgcatacgctgcggccatgaacggtgttgacgcgatcgtctttaccgcaggagttggcgaaaatagcccgattatgcgcgaagaaattattgagaactacttgggctacttagggatcaagatcgataaagaagccaatgacttcaaaggtgaggagaagatcatttcaacgcccgattccaaagtgattgcgatggtagttccgaccaacgaggagctcatgatcgccaaagacacgaaagaaatcattgagaaagggttggacgagcttaagatc

SEQ ID NO: 1044 - protein, 417 aa, synthetic construct
  REGION 1..417: note = variant of acetate kinase from Marinitoga sp.38H-ov
MHHHHHHGGSGMKVLVINSGSSSIKYQLLDMTNEKVLAKGLVERIGIDGSRIVHKVNGEGHVLEHEIKNHEIGLKLVLDLLTDEKYGVLKDLKEIDAVGHRVVHGGERFASSVKITDEVLKTIETLSFLAPLHNPANIMGIKSSMKVLPGVPQVAVFDTAFHQKMPEKAYLYAIPYEYYEKYKIRRYGFHGTSHRYVSKRAAEIMGKPYDQLKIITVHVGNGASVAAVKNGVSVDTSMGFTPLEGLVMGTRSGDIDWAIVEFLEKEEGLSAKEVVNILNKKSGVYGLTKGFSRDMRDIVLKAIEGDPVCRLALDVYYYRIAKYIGAYAAAMNGVDAIVFTAGVGENSPIMREEIIENYLGYLGIKIDKEANDFKGEEKIISTPDSKVIAMVVPTNEELMIAKDTKEIIEKGLDELKI

SEQ ID NO: 1045 - DNA, 1251 bp, synthetic construct
  misc_feature 1..1251: note = variant of acetate kinase from Marinitoga sp.38H-ov
  source 1..1251: mol_type = other DNA
atgcaccatcatcatcatcatggcggtagcggcatgaaagttctggtgattaattctggtagctcctccatcaaatatcagctcctcgatatgaccaacgaaaaggtattagcgaaaggcttggtcgagcgcattggcatcgacggttcgcgtatcgtgcataaagttaacggcgaagggcacgtgctggaacatgagattaaaaatcacgaaattggacttaaattggtcctggatcttcttacggacgaaaaatacggtgtgttgaaggatctcaaagaaatcgatgcagttgggcatcgcgtagtacatggcggcgagcgttttgccagtagcgtgaagattactgacgaagtcttaaagaccatcgagacgttgtcgttcttagctccgttacacaatccagcgaacattatgggtatcaagagcagcatgaaagtgttaccgggtgtgcctcaagttgccgtctttgatacagcgttccaccagaagatgccggagaaagcctatttgtacgcaatcccctatgagtactacgagaaatataaaattcgccgctatgggtttcatggaacctcacatcgttatgtgagtaaacgtgctgcggaaattatgggcaaaccgtacgatcagctcaagatcattaccgttcacgtgggtaacggcgcatcagttgcggcggtgaagaatggcgtatctgttgacacttccatgggtttcacaccacttgaaggtcttgtcatgggcacgcgcagcggcgatattgatccggccatcgtggaatttcttgagaaagaagaaggagtttcggccaaagaagtcgtcaacatcctcaacaagaaatctggtgtgtatgggctcaccaaaggctttagtagggacatgcgtgacattgtgctgaaggctattgaaggtgatcctgtatgccgccttgcattagatgtgtattattatcgtatcgcgaaatatattggcgcatacgctgcggccatgaacggtgttgacgcgatcgtctttaccgcaggagttggcgaaaatagcccgattatgcgcgaagaaattattgagaactacttgggctacttagggatcaagatcgataaagaagccaatgacttcaaaggtgaggagaagatcatttcaacgcccgattccaaagtgattgcgatggtagttccgaccaacgaggagctcatgatcgccaaagacacgaaagaaatcattgagaaagggttggacgagcttaagatc

SEQ ID NO: 1046 - protein, 417 aa, synthetic construct
  REGION 1..417: note = variant of acetate kinase from Marinitoga sp.38H-ov
MHHHHHHGGSGMKVLVINSGSSSIKYQLLDMTNEKVLAKGLVERIGIDGSRIVHKVNGEGHVLEHEIKNHEIGLKLVLDLLTDEKYGVLKDLKEIDAVGHRVVHGGERFASSVKITDEVLKTIETLSFLAPLHNPANIMGIKSSMKVLPGVPQVAVFDTAFHQKMPEKAYLYAIPYEYYEKYKIRRYGFHGTSHRYVSKRAAEIMGKPYDQLKIITVHVGNGASVAAVKNGVSVDTSMGFTPLEGLVMGTRSGDIDPAIVEFLEKEEGVSAKEVVNILNKKSGVYGLTKGFSRDMRDIVLKAIEGDPVCRLALDVYYYRIAKYIGAYAAAMNGVDAIVFTAGVGENSPIMREEIIENYLGYLGIKIDKEANDFKGEEKIISTPDSKVIAMVVPTNEELMIAKDTKEIIEKGLDELKI

SEQ ID NO: 1047 - DNA, 1251 bp, synthetic construct
  misc_feature 1..1251: note = variant of acetate kinase from Marinitoga sp.38H-ov
  source 1..1251: mol_type = other DNA
atgcaccatcatcatcatcatggcggtagcggcatgaaagttctggtgattaattctggtagctcctccatcaaatatcagctcctcgatatgaccaacgaaaaggtattagcgaaaggcttggtcgagcgcattggcatcgacggttcgcgtatcgtgcataaagttaacggcgaagggcacgtgctggaacatgagattaaaaatcacgaaattggacttaaattggtcctggatcttcttacggacgaaaaatacggtgtgttgaaggatctcaaagaaatcgatgcagttgggcatcgcgtagtacatggcggcgagcgttttgccagtagcgtgtcgattactgacgaagtcttaaagaccatcgagacgttgtcgttcttagctccgttacacaatccagcgaacattatgggtatcaagagcagcatgaaagtgttaccgggtgtgcctcaagttgccgtctttgatacagcgttccaccagaagatgccggagaaagcctatttgtacgcaatcccctatgagtactacgagaaatataaaattcgccgctatgggtttcatggaacctcacatcgttatgtgagtaaacgtgctgcggaaattatgggcaaaccgtacgatcagctcaagatcattaccgttcacgtgggtaacggcgcatcagttgcggcggtgaagaatggcgtatctgttgacacttccatgggtttcacaccacttgaaggtcttgtcatgggcacgcgcagcggcgatattgatccggccatcgtggaatttcttgagaaagaagaaggattgtcggccaaagaagtcgtcaacatcctcaacaagaaatctggtgtgtatgggctcaccaaaggctttagtagggacatgcgtgacattgtgctgaaggctattgaaggtgatcctgtatgccgccttgcattagatgtgtattattatcgtatcgcgaaatatattggcgcatacgctgcggccatgaacggtgttgacgcgatcgtctttaccgcaggagttggcgaaaatagcccgattatgcgcgaagaaattattgagaactacttgggctacttagggatcaagatcgataaagaagccaatgacttcaaaggtgaggagaagatcatttcaacgcccgattccaaagtgattgcgatggtagttccgaccaacgaggagctcatgatcgccaaagacacgaaagaaatcattgagaaagggttggacgagcttaagatc

SEQ ID NO: 1048 - protein, 417 aa, synthetic construct
  REGION 1..417: note = variant of acetate kinase from Marinitoga sp.38H-ov
MHHHHHHGGSGMKVLVINSGSSSIKYQLLDMTNEKVLAKGLVERIGIDGSRIVHKVNGEGHVLEHEIKNHEIGLKLVLDLLTDEKYGVLKDLKEIDAVGHRVVHGGERFASSVSITDEVLKTIETLSFLAPLHNPANIMGIKSSMKVLPGVPQVAVFDTAFHQKMPEKAYLYAIPYEYYEKYKIRRYGFHGTSHRYVSKRAAEIMGKPYDQLKIITVHVGNGASVAAVKNGVSVDTSMGFTPLEGLVMGTRSGDIDPAIVEFLEKEEGLSAKEVVNILNKKSGVYGLTKGFSRDMRDIVLKAIEGDPVCRLALDVYYYRIAKYIGAYAAAMNGVDAIVFTAGVGENSPIMREEIIENYLGYLGIKIDKEANDFKGEEKIISTPDSKVIAMVVPTNEELMIAKDTKEIIEKGLDELKI

SEQ ID NO: 1049 - DNA, 1251 bp, synthetic construct
  misc_feature 1..1251: note = variant of acetate kinase from Marinitoga sp.38H-ov
  source 1..1251: mol_type = other DNA
atgcaccatcatcatcatcatggcggtagcggcatgaaagttctggtgattaattctggtagctcctccatcaaatatcagctcctcgatatgaccaacgaaaaggtattagcgaaaggcttggtcgagcgcattggcatcgacggttcgcgtatcgtgcataaagttaacggcgaagggcacgtgctggaacatgagattaaaaatcacgaaattggacttaaattggtcctggatcttcttacggacgaaaaatacggtgtgttgaaggatctcaaagaaatcgatgcagttgggcatcgcgtagtacatggcggcgagcgttttgccagtagcgtgaagattactgacgaagtcttaaagaccatcgagacgttgtcgttcttagctccgttacacaatccagcgaacattatgggtatcaagagcagcatgaaagtgttaccgggtgtgcctcaagttgccgtctttgatacagcgttccaccagaagatgccggagaaagcctatttgtacgcaatcccctatgagtactacgagaaatataaaattcgccgctatgggtttcatggaacctcacatcgttatgtgagtaaacgtgctgcggaaattatgggcaaaccgtacgatcagctcaagatcattaccgttcacgtgggtaacggcgcatcagttgcggcggtgaagaatggcgtatctgttgacacttccatgggtttcacaccacttgaaggtcttgtcatgggcacgcgcagcggcgatattgatccggccatcgtggaatttcttgagaaagaagaaggattgtcggccaaagaagtcgtcaacatcctcaacaagaaatctggtgtgtatgggctcaccaaaggctttagtagggacatgcgtgacattgtgctgaaggctattgaaggtgatcctgtatgccgccttgcattagatatttattattatcgtatcgcgaaatatattggcgcatacgctgcggccatgaacggtgttgacgcgatcgtctttaccgcaggagttggcgaaaatagcccgattatgcgcgaagaaattattgagaactacttgggctacttagggatcaagatcgataaagaagccaatgacttcaaaggtgaggagaagatcatttcaacgcccgattccaaagtgattgcgatggtagttccgaccaacgaggagctcatgatcgccaaagacacgaaagaaatcattgagaaagggttggacgagcttaagatc

SEQ ID NO: 1050 - protein, 417 aa, synthetic construct
  REGION 1..417: note = variant of acetate kinase from Marinitoga sp.38H-ov
MHHHHHHGGSGMKVLVINSGSSSIKYQLLDMTNEKVLAKGLVERIGIDGSRIVHKVNGEGHVLEHEIKNHEIGLKLVLDLLTDEKYGVLKDLKEIDAVGHRVVHGGERFASSVKITDEVLKTIETLSFLAPLHNPANIMGIKSSMKVLPGVPQVAVFDTAFHQKMPEKAYLYAIPYEYYEKYKIRRYGFHGTSHRYVSKRAAEIMGKPYDQLKIITVHVGNGASVAAVKNGVSVDTSMGFTPLEGLVMGTRSGDIDPAIVEFLEKEEGLSAKEVVNILNKKSGVYGLTKGFSRDMRDIVLKAIEGDPVCRLALDIYYYRIAKYIGAYAAAMNGVDAIVFTAGVGENSPIMREEIIENYLGYLGIKIDKEANDFKGEEKIISTPDSKVIAMVVPTNEELMIAKDTKEIIEKGLDELKI

SEQ ID NO: 1051 - DNA, 1251 bp, synthetic construct
  misc_feature 1..1251: note = variant of acetate kinase from Marinitoga sp.38H-ov
  source 1..1251: mol_type = other DNA
atgcaccatcatcatcatcatggcggtagcggcatgaaagttctggtgattaattctggtagctcctccatcaaatatcagctcctcgatatgaccaacgaaaaggtattacggaaaggcttggtcgagcgcattggcatcgacggttcgcgtatcgtgcataaagttaacggcgaagggcacgtgctggaacatgagattaaaaatcacgaaattggacttaaattggtcctggatcttcttacggacgaaaaatacggtgtgttgaaggatctcaaagaaatcgatgcagttgggcatcgcgtagtacatggcggcgagcgttttgccagtagcgtgaagattactgacgaagtcttaaagaccatcgagacgttgtcgttcttagctccgttacacaatccagcgaacattatgggtatcaagagcagcatgaaagtgttaccgggtgtgcctcaagttgccgtctttgatacagcgttccaccagaagatgccggagaaagcctatttgtacgcaatcccctatgagtactacgagaaatataaaattcgccgctatgggtttcatggaacctcacatcgttatgtgagtaaacgtgctgcggaaattatgggcaaaccgtacgatcagctcaagatcattaccgttcacgtgggtaacggcgcatcagttgcggcggtgaagaatggcgtatctgttgacacttccatgggtttcacaccacttgaaggtcttgtcatgggcacgcgcagcggcgatattgatccggccatcgtggaatttcttgagaaagaagaaggattgtcggccaaagaagtcgtcaacatcctcaacaagaaatctggtgtgtatgggctcaccaaaggctttagtagggacatgcgtgacattgtgctgaaggctattgaaggtgatcctgtatgccgccttgcattagatgtgtattattatcgtatcgcgaaatatattggcgcatacgctgcggccatgaacggtgttgacgcgatcgtctttaccgcaggagttggcgaaaatagcccgattatgcgcgaagaaattattgagaactacttgggctacttagggatcaagatcgataaagaagccaatgacttcaaaggtgaggagaagatcatttcaacgcccgattccaaagtgattgcgatggtagttccgaccaacgaggagctcatgatcgccaaagacacgaaagaaatcattgagaaagggttggacgagcttaagatc

SEQ ID NO: 1052 - protein, 417 aa, synthetic construct
  REGION 1..417: note = variant of acetate kinase from Marinitoga sp.38H-ov
MHHHHHHGGSGMKVLVINSGSSSIKYQLLDMTNEKVLRKGLVERIGIDGSRIVHKVNGEGHVLEHEIKNHEIGLKLVLDLLTDEKYGVLKDLKEIDAVGHRVVHGGERFASSVKITDEVLKTIETLSFLAPLHNPANIMGIKSSMKVLPGVPQVAVFDTAFHQKMPEKAYLYAIPYEYYEKYKIRRYGFHGTSHRYVSKRAAEIMGKPYDQLKIITVHVGNGASVAAVKNGVSVDTSMGFTPLEGLVMGTRSGDIDPAIVEFLEKEEGLSAKEVVNILNKKSGVYGLTKGFSRDMRDIVLKAIEGDPVCRLALDVYYYRIAKYIGAYAAAMNGVDAIVFTAGVGENSPIMREEIIENYLGYLGIKIDKEANDFKGEEKIISTPDSKVIAMVVPTNEELMIAKDTKEIIEKGLDELKI

SEQ ID NO: 1053 - DNA, 1251 bp, synthetic construct
  misc_feature 1..1251: note = variant of acetate kinase from Marinitoga sp.38H-ov
  source 1..1251: mol_type = other DNA
atgcaccatcatcatcatcatggcggtagcggcatgaaagttctggtgattaattctggtagctcctccatcaaatatcagctcctcgatatgaccaacgaaaaggtattagcgaaaggcttggtcgagcgcattggcatcgacggttcgcgtatcgtgcataaagttaacggcgaagggcacgtgctggaacatgagattaaaaatcacgaaattggacttaaattggtcctggatcttcttacggacgaaaaatacggtgtgttgaaggatctcaaagaaatcgatgcagttgggcatcgcgtagtacatggcggcgagcgttttgccagtagcgtgcagattactgacgaaatgttaaagaccgtcgagacgttgtcgttcttagctccgttacacaatccagcgaacattatgggtatcaagagcagcatgaaagtgttaccgggtgtgcctcaagttgccgtctttgatacagcgttccaccagaagatgccggagaaagcctatttgtacgcaatcccctatgagtactacgagaaatataaaattcgccgctatgggtttcatggaacctcacatcgttatgtgagtaaacgtgctgcggaaattatgggcaaaccgtacgatcagctcaagatcattaccgttcacgtgggtaacggcgcatcagttgcggcggtgaagaatggcgtatctgttgacacttccatgggtttcacaccacttgaaggtcttgtcatgggcacgcgcagcggcgatattgatccggccatcgtggaatttcttgagaaagaagaaggattgtcggccaaagaagtcgtcaacatcctcaacaagaaatctggtgtgtatgggctcaccaaaggctttagtagggacatgcgtgacattgtgctgaaggctattgaaggtgatcctgtatgccgccttgcattagatgtgtattattatcgtatcgcgaaatatattggcgcatacgctgcggccatgaacggtgttgacgcgatcgtctttaccgcaggagttggcgaaaatagcccgattatgcgcgaagaaattattgagaactacttgggctacttagggatcaagatcgataaagaagccaatgacttcaaaggtgaggagaagatcatttcaacgcccgattccaaagtgattgcgatggtagttccgaccaacgaggagctcatgatcgccaaagacacgaaagaaatcattgagaaagggttggacgagcttaagatc

SEQ ID NO: 1054 - protein, 417 aa, synthetic construct
  REGION 1..417: note = variant of acetate kinase from Marinitoga sp.38H-ov
MHHHHHHGGSGMKVLVINSGSSSIKYQLLDMTNEKVLAKGLVERIGIDGSRIVHKVNGEGHVLEHEIKNHEIGLKLVLDLLTDEKYGVLKDLKEIDAVGHRVVHGGERFASSVQITDEMLKTVETLSFLAPLHNPANIMGIKSSMKVLPGVPQVAVFDTAFHQKMPEKAYLYAIPYEYYEKYKIRRYGFHGTSHRYVSKRAAEIMGKPYDQLKIITVHVGNGASVAAVKNGVSVDTSMGFTPLEGLVMGTRSGDIDPAIVEFLEKEEGLSAKEVVNILNKKSGVYGLTKGFSRDMRDIVLKAIEGDPVCRLALDVYYYRIAKYIGAYAAAMNGVDAIVFTAGVGENSPIMREEIIENYLGYLGIKIDKEANDFKGEEKIISTPDSKVIAMVVPTNEELMIAKDTKEIIEKGLDELKI

SEQ ID NO: 1055 - DNA, 1251 bp, synthetic construct
  misc_feature 1..1251: note = variant of acetate kinase from Marinitoga sp.38H-ov
  source 1..1251: mol_type = other DNA
atgcaccatcatcatcatcatggcggtagcggcatgaaagttctggtgattaattctggtagctcctccatcaaatatcagctcctcgatatgaccaacgaaaaggtattagcgaaaggcttggtcgagcgcattggcatcgacggttcgcgtatcgtgcataaagttaacggcgaagggcacgtgctggaacatgagattaaaaatcacgaaattggacttaaattggtcctggatcttcttacggacgaaaaatacggtgtgttgaaggatctcaaagaaatcgatgcagttgggcatcgcgtagtacatggcggcgagcgttttgccagtagcgtgaagattactgacgaagtcttaaagaccatcgagacgttgtcgttcttagctccgttacacaatccagcgaacattatgggtatcaagagcagcatgaaagtgttaccgggtgtgcctcaagttgccgtctttgatacagcgttccaccagaagatgccggagaaagcctatttgtacgcaatcccctatgagtactacgagaaatataaaattcgccgctatgggtttcatggaacctcacatcgttatgtgagtaaacgtgctgcggaaattatgggcaaaccgtacgatcagctcaagatcattaccgttcacgtgggtaacggcgcatcagttgcggcggtgaagaatggcgtatctgttgacacttccatgggtttcacaccacttgaaggtcttgtcatgggcacgcgcagcggcgatattgatccggccatcgtggaatttcttgagaaagaagaaggattgtcggccaaagaagtcgtcaacatcctcaacaagaaatctggtgtgtatgggctcaccaaaggctttagtagggacatgcgtgacattgtgctgaaggctattgaaggtgatcctgtatgccgccttgcattagatgtgtattattatcgtatcgcgaaatatattggcgcatacgctgcggccatgaacggtgttgacgcgatcgtctttaccgcaggagttggcgaaaatagcccgattatgcgcgaagaaattattgagaactacttgggctacttagggatcaagatcgataaagaagccaatgacttcaaaggtgaggagaagatcatttcaacgcccgatgtgaaagtgattgcgatggtagttccgaccaacgaggagctcatgatcgccaaagacacgaaagaaatcattgagaaagggttggacgagcttaagatc

SEQ ID NO: 1056 - protein, 417 aa, synthetic construct
  REGION 1..417: note = variant of acetate kinase from Marinitoga sp.38H-ov
MHHHHHHGGSGMKVLVINSGSSSIKYQLLDMTNEKVLAKGLVERIGIDGSRIVHKVNGEGHVLEHEIKNHEIGLKLVLDLLTDEKYGVLKDLKEIDAVGHRVVHGGERFASSVKITDEVLKTIETLSFLAPLHNPANIMGIKSSMKVLPGVPQVAVFDTAFHQKMPEKAYLYAIPYEYYEKYKIRRYGFHGTSHRYVSKRAAEIMGKPYDQLKIITVHVGNGASVAAVKNGVSVDTSMGFTPLEGLVMGTRSGDIDPAIVEFLEKEEGLSAKEVVNILNKKSGVYGLTKGFSRDMRDIVLKAIEGDPVCRLALDVYYYRIAKYIGAYAAAMNGVDAIVFTAGVGENSPIMREEIIENYLGYLGIKIDKEANDFKGEEKIISTPDVKVIAMVVPTNEELMIAKDTKEIIEKGLDELKI

SEQ ID NO: 1057 - DNA, 1251 bp, synthetic construct
  misc_feature 1..1251: note = variant of acetate kinase from Marinitoga sp.38H-ov
  source 1..1251: mol_type = other DNA
atgcaccatcatcatcatcatggcggtagcggcatgaaagttctggtgattaattctggtagctcctccatcaaatatcagctcctcgatatgaccaacgaaaaggtattagcgaaaggcttggtcgagcgcattggcatcgacggttcgcgtatcgtgcataaagttaacggcgaagggcacgtgctggaacatgagattaaaaatcacgaaattggacttaaattggtcctggatcttcttacggacgaaaaatacggtgtgttgaaggatctcaaagaaatcgatgcagttgggcatcgcgtagtacatggcggcgagcgttttgccagtagcgtgaagattactgacgaagtcttaaagaccatcgagacgttgtcgttcttagctccgttacacaatccagcgaacattatgggtatcaagagcagcatgaaagtgttaccgggtgtgcctcaagttgccgtctttgatacagcgttccaccagaagatgccggagaaagcctatttgtacgcaatcccctatgagtactacgagaaatataaaattcgccgctatgggtttcatggaacctcacatcgttatgtgagtaaacgtgctgcggaaattcggggcaaaccgtacgatcagctcaagatcattaccgttcacgtgggtaacggcgcatcagttgcggcggtgaagaatggcgtatctgttgacacttccatgggtttcacaccacttgaaggtcttgtcatgggcacgcgcagcggcgatattgatccggccatcgtggaatttcttgagaaagaagaaggattgtcggccaaagaagtcgtcaacatcctcaacaagaaatctggtgtgtatgggctcaccaaaggctttagtagggacatgcgtgacattgtgctgaaggctattgaaggtgatcctgtatgccgccttgcattagatgtgtattattatcgtatcgcgaaatatattggcgcatacgctgcggccatgaacggtgttgacgcgatcgtctttaccgcaggagttggcgaaaatagcccgattatgcgcgaagaaattattgagaactacttgggctacttagggatcaagatcgataaagaagccaatgacttcaaaggtgaggagaagatcatttcaacgcccgattccaaagtgattgcgatggtagttccgaccaacgaggagctcatgatcgccaaagacacgaaagaaatcattgagaaagggttggacgagcttaagatc

SEQ ID NO: 1058 - protein, 417 aa, synthetic construct
  REGION 1..417: note = variant of acetate kinase from Marinitoga sp.38H-ov
MHHHHHHGGSGMKVLVINSGSSSIKYQLLDMTNEKVLAKGLVERIGIDGSRIVHKVNGEGHVLEHEIKNHEIGLKLVLDLLTDEKYGVLKDLKEIDAVGHRVVHGGERFASSVKITDEVLKTIETLSFLAPLHNPANIMGIKSSMKVLPGVPQVAVFDTAFHQKMPEKAYLYAIPYEYYEKYKIRRYGFHGTSHRYVSKRAAEIRGKPYDQLKIITVHVGNGASVAAVKNGVSVDTSMGFTPLEGLVMGTRSGDIDPAIVEFLEKEEGLSAKEVVNILNKKSGVYGLTKGFSRDMRDIVLKAIEGDPVCRLALDVYYYRIAKYIGAYAAAMNGVDAIVFTAGVGENSPIMREEIIENYLGYLGIKIDKEANDFKGEEKIISTPDSKVIAMVVPTNEELMIAKDTKEIIEKGLDELKI

SEQ ID NO: 1059 - DNA, 1251 bp, synthetic construct
  misc_feature 1..1251: note = variant of acetate kinase from Marinitoga sp.38H-ov
  source 1..1251: mol_type = other DNA
atgcaccatcatcatcatcatggcggtagcggcatgaaagttctggtgattaattctggtagctcctccatcaaatatcagctcctcgatatgaccaacgaaaaggtattactgaaaggcttggtcgagcgcattggcatcgacggttcgcgtatcgtgcataaagttaacggcgaagggcacgtgctggaacatgagattaaaaatcacgaaattggacttaaattggtcctggatcttcttacggacgaaaaatacggtgtgttgaaggatctcaaagaaatcgatgcagttgggcatcgcgtagtacatggcggcgagcgttttgccagtagcgtgaagattactgacgaagtcttaaagaccatcgagacgttgtcgttcttagctccgttacacaatccagcgaacattatgggtatcaagagcagcatgaaagtgttaccgggtgtgcctcaagttgccgtctttgatacagcgttccaccagaagatgccggagaaagcctatttgtacgcaatcccctatgagtactacgagaaatataaaattcgccgctatgggtttcatggaacctcacatcgttatgtgagtaaacgtgctgcggaaattatgggcaaaccgtacgatcagctcaagatcattaccgttcacgtgggtaacggcgcatcagttgcggcggtgaagaatggcgtatctgttgacacttccatgggtttcacaccacttgaaggtcttgtcatgggcacgcgcagcggcgatattgatccggccatcgtggaatttcttgagaaagaagaaggattgtcggccaaagaagtcgtcaacatcctcaacaagaaatctggtgtgtatgggctcaccaaaggctttagtagggacatgcgtgacattgtgctgaaggctattgaaggtgatcctgtatgccgccttgcattagatgtgtattattatcgtatcgcgaaatatattggcgcatacgctgcggccatgaacggtgttgacgcgatcgtctttaccgcaggagttggcgaaaatagcccgattatgcgcgaagaaattattgagaactacttgggctacttagggatcaagatcgataaagaagccaatgacttcaaaggtgaggagaagatcatttcaacgcccgattccaaagtgattgcgatggtagttccgaccaacgaggagctcatgatcgccaaagacacgaaagaaatcattgagaaagggttggacgagcttaagatc

SEQ ID NO: 1060 - protein, 417 aa, synthetic construct
  REGION 1..417: note = variant of acetate kinase from Marinitoga sp.38H-ov
MHHHHHHGGSGMKVLVINSGSSSIKYQLLDMTNEKVLLKGLVERIGIDGSRIVHKVNGEGHVLEHEIKNHEIGLKLVLDLLTDEKYGVLKDLKEIDAVGHRVVHGGERFASSVKITDEVLKTIETLSFLAPLHNPANIMGIKSSMKVLPGVPQVAVFDTAFHQKMPEKAYLYAIPYEYYEKYKIRRYGFHGTSHRYVSKRAAEIMGKPYDQLKIITVHVGNGASVAAVKNGVSVDTSMGFTPLEGLVMGTRSGDIDPAIVEFLEKEEGLSAKEVVNILNKKSGVYGLTKGFSRDMRDIVLKAIEGDPVCRLALDVYYYRIAKYIGAYAAAMNGVDAIVFTAGVGENSPIMREEIIENYLGYLGIKIDKEANDFKGEEKIISTPDSKVIAMVVPTNEELMIAKDTKEIIEKGLDELKI

SEQ ID NO: 1061 - DNA, 1251 bp, synthetic construct
  misc_feature 1..1251: note = variant of acetate kinase from Marinitoga sp.38H-ov
  source 1..1251: mol_type = other DNA
atgcaccatcatcatcatcatggcggtagcggcatgaaagttctggtgattaatcagggtagctcctccatcaaatatcagctcctcgatatgaccaacgaaaaggtattagcgaaaggcttggtcgagcgcattggcatcgacggttcgcgtatcgtgcataaagttaacggcgaagggcacgtgctggaacatgagattaaaaatcacgaaattggacttaaattggtcctggatcttcttacggacgaaaaatacggtgtgttgaaggatctcaaagaaatcgatgcagttgggcatcgcgtagtacatggcggcgagcgttttgccagtagcgtgaagattactgacgaagtcttaaagaccatcgagacgttgtcgttcttagctccgttacacaatccagcgaacattatgggtatcaagagcagcatgaaagtgttaccgggtgtgcctcaagttgccgtctttgatacagcgttccaccagaagatgccggagaaagcctatttgtacgcaatcccctatgagtactacgagaaatataaaattcgccgctatgggtttcatggaacctcacatcgttatgtgagtaaacgtgctgcggaaattatgggcaaaccgtacgatcagctcaagatcattaccgttcacgtgggtaacggcgcatcagttgcggcggtgaagaatggcgtatctgttgacacttccatgggtttcacaccacttgaaggtcttgtcatgggcacgcgcagcggcgatattgatccggccatcgtggaatttcttgagaaagaagaaggattgtcggccaaagaagtcgtcaacatcctcaacaagaaatctggtgtgtatgggctcaccaaaggctttagtagggacatgcgtgacattgtgctgaaggctattgaaggtgatcctgtatgccgccttgcattagatgtgtattattatcgtatcgcgaaatatattggcgcatacgctgcggccatgaacggtgttgacgcgatcgtctttaccgcaggagttggcgaaaatagcccgattatgcgcgaagaaattattgagaactacttgggctacttagggatcaagatcgataaagaagccaatgacttcaaaggtgaggagaagatcatttcaacgcccgattccaaagtgattgcgatggtagttccgaccaacgaggagctcatgatcgccaaagacacgaaagaaatcattgagaaagggttggacgagcttaagatc

SEQ ID NO: 1062 - protein, 417 aa, synthetic construct
  REGION 1..417: note = variant of acetate kinase from Marinitoga sp.38H-ov
MHHHHHHGGSGMKVLVINQGSSSIKYQLLDMTNEKVLAKGLVERIGIDGSRIVHKVNGEGHVLEHEIKNHEIGLKLVLDLLTDEKYGVLKDLKEIDAVGHRVVHGGERFASSVKITDEVLKTIETLSFLAPLHNPANIMGIKSSMKVLPGVPQVAVFDTAFHQKMPEKAYLYAIPYEYYEKYKIRRYGFHGTSHRYVSKRAAEIMGKPYDQLKIITVHVGNGASVAAVKNGVSVDTSMGFTPLEGLVMGTRSGDIDPAIVEFLEKEEGLSAKEVVNILNKKSGVYGLTKGFSRDMRDIVLKAIEGDPVCRLALDVYYYRIAKYIGAYAAAMNGVDAIVFTAGVGENSPIMREEIIENYLGYLGIKIDKEANDFKGEEKIISTPDSKVIAMVVPTNEELMIAKDTKEIIEKGLDELKI

SEQ ID NO: 1063 - DNA, 1251 bp, synthetic construct
  misc_feature 1..1251: note = variant of acetate kinase from Marinitoga sp.38H-ov
  source 1..1251: mol_type = other DNA
atgcaccatcatcatcatcatggcggtagcggcatgaaagttctggtgattaattctggtagctcctccatcaaatatcagctcctcgataggaccaacgaaaaggtattagcgaaaggcttggtcgagcgcattggcatcgacggttcgcgtatcgtgcataaagttaacggcgaagggcacgtgctggaacatgagattaaaaatcacgaaattggacttaaattggtcctggatcttcttacggacgaaaaatacggtgtgttgaaggatctcaaagaaatcgatgcagttgggcatcgcgtagtacatggcggcgagcgttttgccagtagcgtgaagattactgacgaagtcttaaagaccatcgagacgttgtcgttcttagctccgttacacaatccagcgaacattatgggtatcaagagcagcatgaaagtgttaccgggtgtgcctcaagttgccgtctttgatacagcgttccaccagaagatgccggagaaagcctatttgtacgcaatcccctatgagtactacgagaaatataaaattcgccgctatgggtttcatggaacctcacatcgttatgtgagtaaacgtgctgcggaaattatgggcaaaccgtacgatcagctcaagatcattaccgttcacgtgggtaacggcgcatcagttgcggcggtgaagaatggcgtatctgttgacacttccatgggtttcacaccacttgaaggtcttgtcatgggcacgcgcagcggcgatattgatccggccatcgtggaatttcttgagaaagaagaaggattgtcggccaaagaagtcgtcaacatcctcaacaagaaatctggtgtgtatgggctcaccaaaggctttagtagggacatgcgtgacattgtgctgaaggctattgaaggtgatcctgtatgccgccttgcattagatgtgtattattatcgtatcgcgaaatatattggcgcatacgctgcggccatgaacggtgttgacgcgatcgtctttaccgcaggagttggcgaaaatagcccgattatgcgcgaagaaattattgagaactacttgggctacttagggatcaagatcgataaagaagccaatgacttcaaaggtgaggagaagatcatttcaacgcccgattccaaagtgattgcgatggtagttccgaccaacgaggagctcatgatcgccaaagacacgaaagaaatcattgagaaagggttggacgagcttaagatc

SEQ ID NO: 1064 - protein, 417 aa, synthetic construct
  REGION 1..417: note = variant of acetate kinase from Marinitoga sp.38H-ov
MHHHHHHGGSGMKVLVINSGSSSIKYQLLDRTNEKVLAKGLVERIGIDGSRIVHKVNGEGHVLEHEIKNHEIGLKLVLDLLTDEKYGVLKDLKEIDAVGHRVVHGGERFASSVKITDEVLKTIETLSFLAPLHNPANIMGIKSSMKVLPGVPQVAVFDTAFHQKMPEKAYLYAIPYEYYEKYKIRRYGFHGTSHRYVSKRAAEIMGKPYDQLKIITVHVGNGASVAAVKNGVSVDTSMGFTPLEGLVMGTRSGDIDPAIVEFLEKEEGLSAKEVVNILNKKSGVYGLTKGFSRDMRDIVLKAIEGDPVCRLALDVYYYRIAKYIGAYAAAMNGVDAIVFTAGVGENSPIMREEIIENYLGYLGIKIDKEANDFKGEEKIISTPDSKVIAMVVPTNEELMIAKDTKEIIEKGLDELKI

SEQ ID NO: 1065 - DNA, 1251 bp, synthetic construct
  misc_feature 1..1251: note = variant of acetate kinase from Marinitoga sp.38H-ov
  source 1..1251: mol_type = other DNA
atgcaccatcatcatcatcatggcggtagcggcatgaaagttctggtgattaattctggtagctcctccatcaaatatcagctcctcgatatgaccaacgaaaaggtattagcgaaaggcttggtcgagcgcattggcatcgacggttcgcgtatcgtgcataaagttaacggcgaagggcacgtgctggaacatgagattaaaaatcacgaaattggacttaaattggtcctggatcttcttacggacgaaaaatacggtccgttgaaggatctcaaagaaatcgatgcagttgggcatcgcgtagtacatggcggcgagcgttttgccagtagcgtgaagattactgacgaagtcttaaagaccatcgagacgttgtcgttcttagctccgttacacaatccagcgaacattatgggtatcaagagcagcatgaaagtgttaccgggtgtgcctcaagttgccgtctttgatacagcgttccaccagaagatgccggagaaagcctatttgtacgcaatcccctatgagtactacgagaaatataaaattcgccgctatgggtttcatggaacctcacatcgttatgtgagtaaacgtgctgcggaaattatgggcaaaccgtacgatcagctcaagatcattaccgttcacgtgggtaacggcgcatcagttgcggcggtgaagaatggcgtatctgttgacacttccatgggtttcacaccacttgaaggtcttgtcatgggcacgcgcagcggcgatattgatccggccatcgtggaatttcttgagaaagaagaaggattgtcggccaaagaagtcgtcaacatcctcaacaagaaatctggtgtgtatgggctcaccaaaggctttagtagggacatgcgtgacattgtgctgaaggctattgaaggtgatcctgtatgccgccttgcattagatgtgtattattatcgtatcgcgaaatatattggcgcatacgctgcggccatgaacggtgttgacgcgatcgtctttaccgcaggagttggcgaaaatagcccgattatgcgcgaagaaattattgagaactacttgggctacttagggatcaagatcgataaagaagccaatgacttcaaaggtgaggagaagatcatttcaacgcccgattccaaagtgattgcgatggtagttccgaccaacgaggagctcatgatcgccaaagacacgaaagaaatcattgagaaagggttggacgagcttaagatc

SEQ ID NO: 1066 - protein, 417 aa, synthetic construct
  REGION 1..417: note = variant of acetate kinase from Marinitoga sp.38H-ov
MHHHHHHGGSGMKVLVINSGSSSIKYQLLDMTNEKVLAKGLVERIGIDGSRIVHKVNGEGHVLEHEIKNHEIGLKLVLDLLTDEKYGPLKDLKEIDAVGHRVVHGGERFASSVKITDEVLKTIETLSFLAPLHNPANIMGIKSSMKVLPGVPQVAVFDTAFHQKMPEKAYLYAIPYEYYEKYKIRRYGFHGTSHRYVSKRAAEIMGKPYDQLKIITVHVGNGASVAAVKNGVSVDTSMGFTPLEGLVMGTRSGDIDPAIVEFLEKEEGLSAKEVVNILNKKSGVYGLTKGFSRDMRDIVLKAIEGDPVCRLALDVYYYRIAKYIGAYAAAMNGVDAIVFTAGVGENSPIMREEIIENYLGYLGIKIDKEANDFKGEEKIISTPDSKVIAMVVPTNEELMIAKDTKEIIEKGLDELKI

SEQ ID NO: 1067 - DNA, 1251 bp, synthetic construct
  misc_feature 1..1251: note = variant of acetate kinase from Marinitoga sp.38H-ov
  source 1..1251: mol_type = other DNA
atgcaccatcatcatcatcatggcggtagcggcatgaaagttctggtgattaatccgggtagctcctccatcaaatatcagctcctcgatatgaccaacgaaaaggtattagcgaaaggcttggtcgagcgcattggcatcgacggttcgcgtatcgtgcataaagttaacggcgaagggcacgtgctggaacatgagattaaaaatcacgaaattggacttaaattggtcctggatcttcttacggacgaaaaatacggtgtgttgaaggatctcaaagaaatcgatgcagttggacatcgcgtagtacatggcggcgagcgttttgccagtagcgtgaagattactgacgaagtcttaaagaccatcgagacgttgtcgttcttagctccgttacacaatccagcgaacattatgggtatcaagagcagcatgaaagtgttaccgggtgtgcctcaagttgccgtctttgatacagcgttccaccagaagatgccggagaaagcctatttgtacgcaatcccctatgagtactacgagaaatataaaattcgccgctatgggtttcatggaacctcacatcgttatgtgagtaaacgtgctgcggaaattatgggcaaaccgtacgatcagctcaagatcattaccgttcacgtgggtaacggcgcatcagttgcggcggtgaagaatggcgtatctgttgacacttccatgggtttcacaccacttgaaggtcttgtcatgggcacgcgcagcggcgatattgatccggccatcgtggaatttcttgagaaagaagaaggattgtcggccaaagaagtcgtcaacatcctcaacaagaaatctggtgtgtatgggctcaccaaaggctttagtagggacatgcgtgacattgtgctgaaggctattgaaggtgatcctgtatgccgccttgcattagatgtgtattattatcgtatcgcgaaatatattggcgcatacgctgcggccatgaacggtgttgacgcgatcgtctttaccgcaggagttggcgaaaatagcccgattatgcgcgaagaaattattgagaactacttgggctacttagggatcaagatcgataaagaagccaatgacttcaaaggtgaggagaagatcatttcaacgcccgattccaaagtgattgcgatggtagttccgaccaacgaggagctcatgatcgccaaagacacgaaagaaatcattgagaaagggttggacgagcttaagatc

SEQ ID NO: 1068 - protein, 417 aa, synthetic construct
  REGION 1..417: note = variant of acetate kinase from Marinitoga sp.38H-ov
MHHHHHHGGSGMKVLVINPGSSSIKYQLLDMTNEKVLAKGLVERIGIDGSRIVHKVNGEGHVLEHEIKNHEIGLKLVLDLLTDEKYGVLKDLKEIDAVGHRVVHGGERFASSVKITDEVLKTIETLSFLAPLHNPANIMGIKSSMKVLPGVPQVAVFDTAFHQKMPEKAYLYAIPYEYYEKYKIRRYGFHGTSHRYVSKRAAEIMGKPYDQLKIITVHVGNGASVAAVKNGVSVDTSMGFTPLEGLVMGTRSGDIDPAIVEFLEKEEGLSAKEVVNILNKKSGVYGLTKGFSRDMRDIVLKAIEGDPVCRLALDVYYYRIAKYIGAYAAAMNGVDAIVFTAGVGENSPIMREEIIENYLGYLGIKIDKEANDFKGEEKIISTPDSKVIAMVVPTNEELMIAKDTKEIIEKGLDELKI

SEQ ID NO: 1069 - DNA, 1251 bp, synthetic construct
  misc_feature 1..1251: note = variant of acetate kinase from Marinitoga sp.38H-ov
  source 1..1251: mol_type = other DNA
atgcaccatcatcatcatcatggcggtagcggcatgaaaatgctggtgattaattctggtagctcctccatcaaatatcagctcctcgatatgaccaacgaaaaggtattagcgaaaggcttggtcgagcgcattggcatcgacggttcgcgtatcgtgcataaagttaacggcgaagggcacgtgctggaacatgagattaaaaatcacgaaattggacttaaattggtcctggatcttcttacggacgaaaaatacggtgtgttgaaggatctcaaagaaatcgatgcagttgggcatcgcgtagtacatggcggcgagcgttttgccagtagcgtgaagattactgacgaagtcttaaagaccatcgagacgttgtcgttcttagctccgttacacaatccagcgaacattatgggtatcaagagcagcatgaaagtgttaccgggtgtgcctcaagttgccgtctttgatacagcgttccaccagaagatgccggagaaagcctatttgtacgcaatcccctatgagtactacgagaaatataaaattcgccgctatgggtttcatggaacctcacatcgttatgtgagtaaacgtgctgcggaaattatgggcaaaccgtacgatcagctcaagatcattaccgttcacgtgggtaacggcgcatcagttgcggcggtgaagaatggcgtatctgttgacacttccatgggtttcacaccacttgaaggtcttgtcatgggcacgcgcagcggcgatattgatccggccatcgtggaatttcttgagaaagaagaaggattgtcggccaaagaagtcgtcaacatcctcaacaagaaatctggtgtgtatgggctcaccaaaggctttagtagggacatgcgtgacattgtgctgaaggctattgaaggtgatcctgtatgccgccttgcattagatgtgtattattatcgtatcgcgaaatatattggcgcatacgctgcggccatgaacggtgttgacgcgatcgtctttaccgcaggagttggcgaaaatagcccgattatgcgcgaagaaattattgagaactacttgggctacttagggatcaagatcgataaagaagccaatgacttcaaaggtgaggagaagatcatttcaacgcccgattccaaagtgattgcgatggtagttccgaccaacgaggagctcatgatcgccaaagacacgaaagaaatcattgagaaagggttggacgagcttaagatc

SEQ ID NO: 1070 - protein, 417 aa, synthetic construct
  REGION 1..417: note = variant of acetate kinase from Marinitoga sp.38H-ov
MHHHHHHGGSGMKMLVINSGSSSIKYQLLDMTNEKVLAKGLVERIGIDGSRIVHKVNGEGHVLEHEIKNHEIGLKLVLDLLTDEKYGVLKDLKEIDAVGHRVVHGGERFASSVKITDEVLKTIETLSFLAPLHNPANIMGIKSSMKVLPGVPQVAVFDTAFHQKMPEKAYLYAIPYEYYEKYKIRRYGFHGTSHRYVSKRAAEIMGKPYDQLKIITVHVGNGASVAAVKNGVSVDTSMGFTPLEGLVMGTRSGDIDPAIVEFLEKEEGLSAKEVVNILNKKSGVYGLTKGFSRDMRDIVLKAIEGDPVCRLALDVYYYRIAKYIGAYAAAMNGVDAIVFTAGVGENSPIMREEIIENYLGYLGIKIDKEANDFKGEEKIISTPDSKVIAMVVPTNEELMIAKDTKEIIEKGLDELKI

SEQ ID NO: 1071 - DNA, 1251 bp, synthetic construct
  misc_feature 1..1251: note = variant of acetate kinase from Marinitoga sp.38H-ov
  source 1..1251: mol_type = other DNA
atgcaccatcatcatcatcatggcggtagcggcatgaaagttctggtgattaattctggtagctcctccatcaaatatcagctcctcgatatgaccaacgaaaaggtattatataaaggcttggtcgagcgcattggcatcgacggttcgcgtatcgtgcataaagttaacggcgaagggcacgtgctggaacatgagattaaaaatcacgaaattggacttaaattggtcctggatcttcttacggacgaaaaatacggtgtgttgaaggatctcaaagaaatcgatgcagttgggcatcgcgtagtacatggcggcgagcgttttgccagtagcgtgaagattactgacgaagtcttaaagaccatcgagacgttgtcgttcttagctccgttacacaatccagcgaacattatgggtatcaagagcagcatgaaagtgttaccgggtgtgcctcaagttgccgtctttgatacagcgttccaccagaagatgccggagaaagcctatttgtacgcaatcccctatgagtactacgagaaatataaaattcgccgctatgggtttcatggaacctcacatcgttatgtgagtaaacgtgctgcggaaattatgggcaaaccgtacgatcagctcaagatcattaccgttcacgtgggtaacggcgcatcagttgcggcggtgaagaatggcgtatctgttgacacttccatgggtttcacaccacttgaaggtcttgtcatgggcacgcgcagcggcgatattgatccggccatcgtggaatttcttgagaaagaagaaggattgtcggccaaagaagtcgtcaacatcctcaacaagaaatctggtgtgtatgggctcaccaaaggctttagtagggacatgcgtgacattgtgctgaaggctattgaaggtgatcctgtatgccgccttgcattagatgtgtattattatcgtatcgcgaaatatattggcgcatacgctgcggccatgaacggtgttgacgcgatcgtctttaccgcaggagttggcgaaaatagcccgattatgcgcgaagaaattattgagaactacttgggctacttagggatcaagatcgataaagaagccaatgacttcaaaggtgaggagaagatcatttcaacgcccgattccaaagtgattgcgatggtagttccgaccaacgaggagctcatgatcgccaaagacacgaaagaaatcattgagaaagggttggacgagcttaagatc

SEQ ID NO: 1072 - protein, 417 aa, synthetic construct
  REGION 1..417: note = variant of acetate kinase from Marinitoga sp.38H-ov
MHHHHHHGGSGMKVLVINSGSSSIKYQLLDMTNEKVLYKGLVERIGIDGSRIVHKVNGEGHVLEHEIKNHEIGLKLVLDLLTDEKYGVLKDLKEIDAVGHRVVHGGERFASSVKITDEVLKTIETLSFLAPLHNPANIMGIKSSMKVLPGVPQVAVFDTAFHQKMPEKAYLYAIPYEYYEKYKIRRYGFHGTSHRYVSKRAAEIMGKPYDQLKIITVHVGNGASVAAVKNGVSVDTSMGFTPLEGLVMGTRSGDIDPAIVEFLEKEEGLSAKEVVNILNKKSGVYGLTKGFSRDMRDIVLKAIEGDPVCRLALDVYYYRIAKYIGAYAAAMNGVDAIVFTAGVGENSPIMREEIIENYLGYLGIKIDKEANDFKGEEKIISTPDSKVIAMVVPTNEELMIAKDTKEIIEKGLDELKI

SEQ ID NO: 1073 - DNA, 1251 bp, synthetic construct
  misc_feature 1..1251: note = variant of acetate kinase from Marinitoga sp.38H-ov
  source 1..1251: mol_type = other DNA
atgcaccatcatcatcatcatggcggtagcggcatgaaagttctggtgattaattctggtagctcctccatcaaatatcagctcctcgatatgaccaacgaaaaggtattagcgaaaggcttggtcgagcgcattggcatcgacggttcgcgtatcgtgcataaagttaacggcgaagggcacgtgctggaacatgagattaaaaatcacgaaattggacttaaattggtcctggatcttcttacggacgaaaaatacggtaatttgaaggatctcaaagaaatcgatgcagttgggcatcgcgtagtacatggcggcgagcgttttgccagtagcgtgaagattactgacgaagtcttaaagaccatcgagacgttgtcgttcttagctccgttacacaatccagcgaacattatgggtatcaagagcagcatgaaagtgttaccgggtgtgcctcaagttgccgtctttgatacagcgttccaccagaagatgccggagaaagcctatttgtacgcaatcccctatgagtactacgagaaatataaaattcgccgctatgggtttcatggaacctcacatcgttatgtgagtaaacgtgctgcggaaattatgggcaaaccgtacgatcagctcaagatcattaccgttcacgtgggtaacggcgcatcagttgcggcggtgaagaatggcgtatctgttgacacttccatgggtttcacaccacttgaaggtcttgtcatgggcacgcgcagcggcgatattgatccggccatcgtggaatttcttgagaaagaagaaggattgtcggccaaagaagtcgtcaacatcctcaacaagaaatctggtgtgtatgggctcaccaaaggctttagtagggacatgcgtgacattgtgctgaaggctattgaaggtgatcctgtatgccgccttgcattagatgtgtattattatcgtatcgcgaaatatattggcgcatacgctgcggccatgaacggtgttgacgcgatcgtctttaccgcaggagttggcgaaaatagcccgattatgcgcgaagaaattattgagaactacttgggctacttagggatcaagatcgataaagaagccaatgacttcaaaggtgaggagaagatcatttcaacgcccgattccaaagtgattgcgatggtagttccgaccaacgaggagctcatgatcgccaaagacacgaaagaaatcattgagaaagggttggacgagcttaagatc

SEQ ID NO: 1074 - protein, 417 aa, synthetic construct
  REGION 1..417: note = variant of acetate kinase from Marinitoga sp.38H-ov
MHHHHHHGGSGMKVLVINSGSSSIKYQLLDMTNEKVLAKGLVERIGIDGSRIVHKVNGEGHVLEHEIKNHEIGLKLVLDLLTDEKYGNLKDLKEIDAVGHRVVHGGERFASSVKITDEVLKTIETLSFLAPLHNPANIMGIKSSMKVLPGVPQVAVFDTAFHQKMPEKAYLYAIPYEYYEKYKIRRYGFHGTSHRYVSKRAAEIMGKPYDQLKIITVHVGNGASVAAVKNGVSVDTSMGFTPLEGLVMGTRSGDIDPAIVEFLEKEEGLSAKEVVNILNKKSGVYGLTKGFSRDMRDIVLKAIEGDPVCRLALDVYYYRIAKYIGAYAAAMNGVDAIVFTAGVGENSPIMREEIIENYLGYLGIKIDKEANDFKGEEKIISTPDSKVIAMVVPTNEELMIAKDTKEIIEKGLDELKI

SEQ ID NO: 1075 - DNA, 1251 bp, synthetic construct
  misc_feature 1..1251: note = variant of acetate kinase from Marinitoga sp.38H-ov
  source 1..1251: mol_type = other DNA
atgcaccatcatcatcatcatggcggtagcggcatgaaagttctggtgattaattctggtagctcctccatcaaatatcagctcctcgatatgaccaacgaaaaggtattagcgaaaggcttggtcgagcgcattggcatcgacggttcgcgtatcgtgcataaagttaacggcgaagggcacgtgctggaacatgagattaaaaatcacgaaattggacttaaattggtcctggatcttcttacggacgaaaaatacggtgtgttgaaggatctcaaagaaatcgatgcagttgggcatcgcgtagtacatggcggcgagcgttttgccagtagcgtgaagattactgacgaagtcttaaagaccatcgagacgttgtcgttcttagctccgttacacaatccagcgaacattatgggtatcaagagcagcatgaaagtgttaccgggtgtgattcaagttgccgtctttgatacagcgttccaccagaagatgccggagaaagcctatttgtacgcaatcccctatgagtactacgagaaatataaaattcgccgctatgggtttcatggaacctcacatcgttatgtgagtaaacgtgctgcggaaattatgggcaaaccgtacgatcagctcaagatcattaccgttcacgtgggtaacggcgcatcagttgcggcggtgaagaatggcgtatctgttgacacttccatgggtttcacaccacttgaaggtcttgtcatgggcacgcgcagcggcgatattgatccggccatcgtggaatttcttgagaaagaagaaggattgtcggccaaagaagtcgtcaacatcctcaacaagaaatctggtgtgtatgggctcaccaaaggctttagtagggacatgcgtgacattgtgctgaaggctattgaaggtgatcctgtatgccgccttgcattagatgtgtattattatcgtatcgcgaaatatattggcgcatacgctgcggccatgaacggtgttgacgcgatcgtctttaccgcaggagttggcgaaaatagcccgattatgcgcgaagaaattattgagaactacttgggctacttagggatcaagatcgataaagaagccaatgacttcaaaggtgaggagaagatcatttcaacgcccgattccaaagtgattgcgatggtagttccgaccaacgaggagctcatgatcgccaaagacacgaaagaaatcattgagaaagggttggacgagcttaagatc

SEQ ID NO: 1076 - protein, 417 aa, synthetic construct
  REGION 1..417: note = variant of acetate kinase from Marinitoga sp.38H-ov
MHHHHHHGGSGMKVLVINSGSSSIKYQLLDMTNEKVLAKGLVERIGIDGSRIVHKVNGEGHVLEHEIKNHEIGLKLVLDLLTDEKYGVLKDLKEIDAVGHRVVHGGERFASSVKITDEVLKTIETLSFLAPLHNPANIMGIKSSMKVLPGVIQVAVFDTAFHQKMPEKAYLYAIPYEYYEKYKIRRYGFHGTSHRYVSKRAAEIMGKPYDQLKIITVHVGNGASVAAVKNGVSVDTSMGFTPLEGLVMGTRSGDIDPAIVEFLEKEEGLSAKEVVNILNKKSGVYGLTKGFSRDMRDIVLKAIEGDPVCRLALDVYYYRIAKYIGAYAAAMNGVDAIVFTAGVGENSPIMREEIIENYLGYLGIKIDKEANDFKGEEKIISTPDSKVIAMVVPTNEELMIAKDTKEIIEKGLDELKI

SEQ ID NO: 1077 - DNA, 1251 bp, synthetic construct
  misc_feature 1..1251: note = variant of acetate kinase from Marinitoga sp.38H-ov
  source 1..1251: mol_type = other DNA
atgcaccatcatcatcatcatggcggtagcggcatgaaagttctggtgattaattctggtagctcctccatcaaatatcagctcctcgatatgaccaacgaaaaggtattagcgaaaggcttggtcgagcgcattggcatcgacggttcgcgtatcgtgcataaagttaacggcgaagggcacgtgctggaacatgagattaaaaatcacgaaattggacttaaattggtcctggatcttcttacggacgaaaaatacggtgtgttgaaggatctcaaagaaatcgatgcagttgggcatcgcgtagtacatggcggcgagcgttttgccagtagcgtgaagattactgacgaagtcttaaagaccatcgagacgttgtcgttcttagctccgttacacaatccagcgaacattatgggtatcaagagcagcatgaaagtgttaccgggtgtgcctcaagttgccgtctttgatacagcgttccaccagaagatgccggagaaagcctatttgtacgcaatcccctatgagtactacgagaaatataaaattcgccgctatgggtttcatggaacctcacatcgttatgtgagtaaacgtgctgcggaaattatgggcaaaccgtacgagcagctcaagatcattaccgttcacgtgggtaacggcgcatcagttgcggcggtgaagaatggcgtatctgttgacacttccatgggtttcacaccacttgaaggtcttgtcatgggcacgcgcagcggcgatattgatccggccatcgtggaatttcttgagaaagaagaaggattgtcggccaaagaagtcgtcaacatcctcaacaagaaatctggtgtgtatgggctcaccaaaggctttagtagggacatgcgtgacattgtgctgaaggctattgaaggtgatcctgtatgccgccttgcattagatgtgtattattatcgtatcgcgaaatatattggcgcatacgctgcggccatgaacggtgttgacgcgatcgtctttaccgcaggagttggcgaaaatagcccgattatgcgcgaagaaattattgagaactacttgggctacttagggatcaagatcgataaagaagccaatgacttcaaaggtgaggagaagatcatttcaacgcccgattccaaagtgattgcgatggtagttccgaccaacgaggagctcatgatcgccaaagacacgaaagaaatcattgagaaagggttggacgagcttaagatc

SEQ ID NO: 1078 - protein, 417 aa, synthetic construct
  REGION 1..417: note = variant of acetate kinase from Marinitoga sp.38H-ov
MHHHHHHGGSGMKVLVINSGSSSIKYQLLDMTNEKVLAKGLVERIGIDGSRIVHKVNGEGHVLEHEIKNHEIGLKLVLDLLTDEKYGVLKDLKEIDAVGHRVVHGGERFASSVKITDEVLKTIETLSFLAPLHNPANIMGIKSSMKVLPGVPQVAVFDTAFHQKMPEKAYLYAIPYEYYEKYKIRRYGFHGTSHRYVSKRAAEIMGKPYEQLKIITVHVGNGASVAAVKNGVSVDTSMGFTPLEGLVMGTRSGDIDPAIVEFLEKEEGLSAKEVVNILNKKSGVYGLTKGFSRDMRDIVLKAIEGDPVCRLALDVYYYRIAKYIGAYAAAMNGVDAIVFTAGVGENSPIMREEIIENYLGYLGIKIDKEANDFKGEEKIISTPDSKVIAMVVPTNEELMIAKDTKEIIEKGLDELKI

SEQ ID NO: 1079 - DNA, 1251 bp, synthetic construct
  misc_feature 1..1251: note = variant of acetate kinase from Marinitoga sp.38H-ov
  source 1..1251: mol_type = other DNA
atgcaccatcatcatcatcatggcggtagcggcatgaaagttctggtgattaattctggtagctcctccatcaaatatcagctcctcgatatgaccaacgaaaaggtattagcgaaaggcttggtcgagcgcattggcatcgacggttcgcgtatcgtgcataaagttaacggcgaagggcacgtgctggaacatgagattaaaaatcacgaaattggacttaaattggtcctggatcttcttacggacgaaaaatacggtgtgttgaaggatctcaaagaaatcgatgcagttgggcatcgcgtagtacatggcggcgagcgttttgccagtagcgtgaagattactgacgaagtcttaaagaccatcgagacgttgtcgttcttagctccgttacacaatccagcgaacattatgggtatcaagagcagcatgaaagtgttaccgggtgtgcctcaagttgccgtctttgatacagcgttccaccagaagatgccggagaaagcctatttgtacgcaatcccctatgagtactacgagaaatataaaattcgccgctatgggtttcatggaacctcacatcgttatgtgagtaaacgtgctgcggaaattatgggcaaaccgtacgatcagctcaagatcattaccgttcacgtgggtaacggcgcatcagttgcggcggtgaagaatggcgtatctgttgacacttccatgggtttcacaccacttgaaggtcttgtcatgggcacgcgcagcggcgatattgatccggccatcgtggaatttcttgagaaagaagaaggattgtcggccaaagaagtcgtcaacatcctcaacaagaaatctggtgtgtatgggctcaccaaaggctttagtagggacatgcgtgacattgtgctgaaggctattgaaggtgatcctgtatgccgccttgcattagatgtgtattattatcgtatcgcgaaatatattggcgcatacgctgcggccatgaacggtgttgacgcgatcgtctttaccgcaggagttggcgaaaatagcccgattatgcgcgaagaaattattgagaactacttgggctacttagggatcaagatcgataaagaagccaatgacttcaaaggtgaggagaagatcatttcaacgcccaagtccaaagtgattgcgatggtagttccgaccaacgaggagctcatgatcgccaaagacacgaaagaaatcattgagaaagggttggacgagcttaagatc

SEQ ID NO: 1080 - protein, 417 aa, synthetic construct
  REGION 1..417: note = variant of acetate kinase from Marinitoga sp.38H-ov
MHHHHHHGGSGMKVLVINSGSSSIKYQLLDMTNEKVLAKGLVERIGIDGSRIVHKVNGEGHVLEHEIKNHEIGLKLVLDLLTDEKYGVLKDLKEIDAVGHRVVHGGERFASSVKITDEVLKTIETLSFLAPLHNPANIMGIKSSMKVLPGVPQVAVFDTAFHQKMPEKAYLYAIPYEYYEKYKIRRYGFHGTSHRYVSKRAAEIMGKPYDQLKIITVHVGNGASVAAVKNGVSVDTSMGFTPLEGLVMGTRSGDIDPAIVEFLEKEEGLSAKEVVNILNKKSGVYGLTKGFSRDMRDIVLKAIEGDPVCRLALDVYYYRIAKYIGAYAAAMNGVDAIVFTAGVGENSPIMREEIIENYLGYLGIKIDKEANDFKGEEKIISTPKSKVIAMVVPTNEELMIAKDTKEIIEKGLDELKI

SEQ ID NO: 1081 - DNA, 1251 bp, synthetic construct
  misc_feature 1..1251: note = variant of acetate kinase from Marinitoga sp.38H-ov
  source 1..1251: mol_type = other DNA
atgcaccatcatcatcatcatggcggtagcggcatgaaagttctggtgattaattctggtagctcctccatcaaatatcagctcctcgatatgaccaacgaaaaggtattagcgaaaggcttggtcgagcgcattggcatcgacggttcgcgtatcgtgcataaagttaacggcgaagggcacgtgctggaacatgagattaaaaatcacgaaattggacttaaattggtcctggatcttcttacggacgaaaaatacggtgtgttgaaggatctcaaagaaatcgatgcagttgggcatcgcgtagtacatggcggcgagcgttttgccagtagcgtgaagattactgacgaagtcttaaagaccatcgagacgttgtcgttcttagctccgttacacaatccagcgaacattatgggtatcaagagcagcatgaaagtgttaccgggtgtgcctcaagttgccgtctttgatacagcgttccaccagaagatgccggagaaagcctatttgtacgcaatcccctatgagtactacgagaaatataaaattcgccgctatgggtttcatggaacctcacatcgttatgtgagtaaacgtgctgcggaaattatgggcaaaccgtacgatcagctcaagatcattaccgttcacgtgggtaacggcgcatcagttgcggcggtgaagaatggcgtatctgttgacacttccatgggtttcacaccacttgaaggtcttgtcatgggcacgcgcagcggcgatattgatccggccatcgtggaatttcttgagaaagaagaaggattgtcggccaaaacggtcgtcaacatcctcaacaagaaatctggtgtgtatgggctcaccaaaggctttagtagggacatgcgtgacattgtgctgaaggctattgaaggtgatcctgtatgccgccttgcattagatgtgtattattatcgtatcgcgaaatatattggcgcatacgctgcggccatgaacggtgttgacgcgatcgtctttaccgcaggagttggcgaaaatagcccgattatgcgcgaagaaattattgagaactacttgggctacttagggatcaagatcgataaagaagccaatgacttcaaaggtgaggagaagatcatttcaacgcccgattccaaagtgattgcgatggtagttccgaccaacgaggagctcatgatcgccaaagacacgaaagaaatcattgagaaagggttggacgagcttaagatc

SEQ ID NO: 1082 - protein, 417 aa, synthetic construct
  REGION 1..417: note = variant of acetate kinase from Marinitoga sp.38H-ov
MHHHHHHGGSGMKVLVINSGSSSIKYQLLDMTNEKVLAKGLVERIGIDGSRIVHKVNGEGHVLEHEIKNHEIGLKLVLDLLTDEKYGVLKDLKEIDAVGHRVVHGGERFASSVKITDEVLKTIETLSFLAPLHNPANIMGIKSSMKVLPGVPQVAVFDTAFHQKMPEKAYLYAIPYEYYEKYKIRRYGFHGTSHRYVSKRAAEIMGKPYDQLKIITVHVGNGASVAAVKNGVSVDTSMGFTPLEGLVMGTRSGDIDPAIVEFLEKEEGLSAKTVVNILNKKSGVYGLTKGFSRDMRDIVLKAIEGDPVCRLALDVYYYRIAKYIGAYAAAMNGVDAIVFTAGVGENSPIMREEIIENYLGYLGIKIDKEANDFKGEEKIISTPDSKVIAMVVPTNEELMIAKDTKEIIEKGLDELKI

SEQ ID NO: 1083 - DNA, 1251 bp, synthetic construct
  misc_feature 1..1251: note = variant of acetate kinase from Marinitoga sp.38H-ov
  source 1..1251: mol_type = other DNA
atgcaccatcatcatcatcatggcggtagcggcatgaaagttctggtgattaattctggtagctcctccatcaaatatcagctcctcgatatgaccaacgaaaaggtattaatgaaaggcttggtcgagcgcattggcatcgacggttcgcgtatcgtgcataaagttaacggcgaagggcacgtgctggaacatgagattaaaaatcacgaaattggacttaaattggtcctggatcttcttacggacgaaaaatacggtgtgttgaaggatctcaaagaaatcgatgcagttgggcatcgcgtagtacatggcggcgagcgttttgccagtagcgtgaagattactgacgaagtcttaaagaccatcgagacgttgtcgttcttagctccgttacacaatccagcgaacattatgggtatcaagagcagcatgaaagtgttaccgggtgtgcctcaagttgccgtctttgatacagcgttccaccagaagatgccggagaaagcctatttgtacgcaatcccctatgagtactacgagaaatataaaattcgccgctatgggtttcatggaacctcacatcgttatgtgagtaaacgtgctgcggaaattatgggcaaaccgtacgatcagctcaagatcattaccgttcacgtgggtaacggcgcatcagttgcggcggtgaagaatggcgtatctgttgacacttccatgggtttcacaccacttgaaggtcttgtcatgggcacgcgcagcggcgatattgatccggccatcgtggaatttcttgagaaagaagaaggattgtcggccaaagaagtcgtcaacatcctcaacaagaaatctggtgtgtatgggctcaccaaaggctttagtagggacatgcgtgacattgtgctgaaggctattgaaggtgatcctgtatgccgccttgcattagatgtgtattattatcgtatcgcgaaatatattggcgcatacgctgcggccatgaacggtgttgacgcgatcgtctttaccgcaggagttggcgaaaatagcccgattatgcgcgaagaaattattgagaactacttgggctacttagggatcaagatcgataaagaagccaatgacttcaaaggtgaggagaagatcatttcaacgcccgattccaaagtgattgcgatggtagttccgaccaacgaggagctcatgatcgccaaagacacgaaagaaatcattgagaaagggttggacgagcttaagatc

SEQ ID NO: 1084 - protein, 417 aa, synthetic construct
  REGION 1..417: note = variant of acetate kinase from Marinitoga sp.38H-ov
MHHHHHHGGSGMKVLVINSGSSSIKYQLLDMTNEKVLMKGLVERIGIDGSRIVHKVNGEGHVLEHEIKNHEIGLKLVLDLLTDEKYGVLKDLKEIDAVGHRVVHGGERFASSVKITDEVLKTIETLSFLAPLHNPANIMGIKSSMKVLPGVPQVAVFDTAFHQKMPEKAYLYAIPYEYYEKYKIRRYGFHGTSHRYVSKRAAEIMGKPYDQLKIITVHVGNGASVAAVKNGVSVDTSMGFTPLEGLVMGTRSGDIDPAIVEFLEKEEGLSAKEVVNILNKKSGVYGLTKGFSRDMRDIVLKAIEGDPVCRLALDVYYYRIAKYIGAYAAAMNGVDAIVFTAGVGENSPIMREEIIENYLGYLGIKIDKEANDFKGEEKIISTPDSKVIAMVVPTNEELMIAKDTKEIIEKGLDELKI

SEQ ID NO: 1085 - DNA, 1251 bp, synthetic construct
  misc_feature 1..1251: note = variant of acetate kinase from Marinitoga sp.38H-ov
  source 1..1251: mol_type = other DNA
atgcaccatcatcatcatcatggcggtagcggcatgaaagttctggtgattaattctggtagctcctccatcaaatatcagctcctcgattggaccaacgaaaaggtattagcgaaaggcttggtcgagcgcattggcatcgacggttcgcgtatcgtgcataaagttaacggcgaagggcacgtgctggaacatgagattaaaaatcacgaaattggacttaaattggtcctggatcttcttacggacgaaaaatacggtgtgttgaaggatctcaaagaaatcgatgcagttgggcatcgcgtagtacatggcggcgagcgttttgccagtagcgtgaagattactgacgaagtcttaaagaccatcgagacgttgtcgttcttagctccgttacacaatccagcgaacattatgggtatcaagagcagcatgaaagtgttaccgggtgtgcctcaagttgccgtctttgatacagcgttccaccagaagatgccggagaaagcctatttgtacgcaatcccctatgagtactacgagaaatataaaattcgccgctatgggtttcatggaacctcacatcgttatgtgagtaaacgtgctgcggaaattatgggcaaaccgtacgatcagctcaagatcattaccgttcacgtgggtaacggcgcatcagttgcggcggtgaagaatggcgtatctgttgacacttccatgggtttcacaccacttgaaggtcttgtcatgggcacgcgcagcggcgatattgatccggccatcgtggaatttcttgagaaagaagaaggattgtcggccaaagaagtcgtcaacatcctcaacaagaaatctggtgtgtatgggctcaccaaaggctttagtagggacatgcgtgacattgtgctgaaggctattgaaggtgatcctgtatgccgccttgcattagatgtgtattattatcgtatcgcgaaatatattggcgcatacgctgcggccatgaacggtgttgacgcgatcgtctttaccgcaggagttggcgaaaatagcccgattatgcgcgaagaaattattgagaactacttgggctacttagggatcaagatcgataaagaagccaatgacttcaaaggtgaggagaagatcatttcaacgcccgattccaaagtgattgcgatggtagttccgaccaacgaggagctcatgatcgccaaagacacgaaagaaatcattgagaaagggttggacgagcttaagatc

SEQ ID NO: 1086 - protein, 417 aa, synthetic construct
  REGION 1..417: note = variant of acetate kinase from Marinitoga sp.38H-ov
MHHHHHHGGSGMKVLVINSGSSSIKYQLLDWTNEKVLAKGLVERIGIDGSRIVHKVNGEGHVLEHEIKNHEIGLKLVLDLLTDEKYGVLKDLKEIDAVGHRVVHGGERFASSVKITDEVLKTIETLSFLAPLHNPANIMGIKSSMKVLPGVPQVAVFDTAFHQKMPEKAYLYAIPYEYYEKYKIRRYGFHGTSHRYVSKRAAEIMGKPYDQLKIITVHVGNGASVAAVKNGVSVDTSMGFTPLEGLVMGTRSGDIDPAIVEFLEKEEGLSAKEVVNILNKKSGVYGLTKGFSRDMRDIVLKAIEGDPVCRLALDVYYYRIAKYIGAYAAAMNGVDAIVFTAGVGENSPIMREEIIENYLGYLGIKIDKEANDFKGEEKIISTPDSKVIAMVVPTNEELMIAKDTKEIIEKGLDELKI

SEQ ID NO: 1087 - DNA, 1251 bp, synthetic construct
  misc_feature 1..1251: note = variant of acetate kinase from Marinitoga sp.38H-ov
  source 1..1251: mol_type = other DNA
atgcaccatcatcatcatcatggcggtagcggcatgaaagttctggtgattaattctggtagctcctccatcaaatatcagctcctcgatatgaccaacgaaaaggtattagcgaaaggcttggtcgagcgcattggcatcgacggttcgcgtatcgtgcataaagttaacggcgaagggcacgtgctggaacatgagattaaaaatcacgaaattggacttaaattggtcctggatcttcttacggacgaaaaatacggtgtgttgaaggatctcaaagaaatcgatgcagttgggcatcgcgtagtacatggcggcgagcgttttgccagtagcgtgaagattactgacgaagtcttaaagaccatcgagacgttgtcgttcttagctccgttacacaatccagcgaacattatgggtatcaagagcagcatgaaagtgttaccgggtgtgcctcaagttgccgtctttgatacagcgttccaccagaagatgccggagaaagcctatttgtacgcaatcccctatgagtactacgagaaatataaaattcgccgctatgggtttcatggaacctcacatcgttatgtgagtaaacgtgctgcggaaattatgggcaaaccgtacgttcagctcaagatcattaccgttcacgtgggtaacggcgcatcagttgcggcggtgaagaatggcgtatctgttgacacttccatgggtttcacaccacttgaaggtcttgtcatgggcacgcgcagcggcgatattgatccggccatcgtggaatttcttgagaaagaagaaggattgtcggccaaagaagtcgtcaacatcctcaacaagaaatctggtgtgtatgggctcaccaaaggctttagtagggacatgcgtgacattgtgctgaaggctattgaaggtgatcctgtatgccgccttgcattagatgtgtattattatcgtatcgcgaaatatattggcgcatacgctgcggccatgaacggtgttgacgcgatcgtctttaccgcaggagttggcgaaaatagcccgattatgcgcgaagaaattattgagaactacttgggctacttagggatcaagatcgataaagaagccaatgacttcaaaggtgaggagaagatcatttcaacgcccgattccaaagtgattgcgatggtagttccgaccaacgaggagctcatgatcgccaaagacacgaaagaaatcattgagaaagggttggacgagcttaagatc

SEQ ID NO: 1088 - protein, 417 aa, synthetic construct
  REGION 1..417: note = variant of acetate kinase from Marinitoga sp.38H-ov
MHHHHHHGGSGMKVLVINSGSSSIKYQLLDMTNEKVLAKGLVERIGIDGSRIVHKVNGEGHVLEHEIKNHEIGLKLVLDLLTDEKYGVLKDLKEIDAVGHRVVHGGERFASSVKITDEVLKTIETLSFLAPLHNPANIMGIKSSMKVLPGVPQVAVFDTAFHQKMPEKAYLYAIPYEYYEKYKIRRYGFHGTSHRYVSKRAAEIMGKPYVQLKIITVHVGNGASVAAVKNGVSVDTSMGFTPLEGLVMGTRSGDIDPAIVEFLEKEEGLSAKEVVNILNKKSGVYGLTKGFSRDMRDIVLKAIEGDPVCRLALDVYYYRIAKYIGAYAAAMNGVDAIVFTAGVGENSPIMREEIIENYLGYLGIKIDKEANDFKGEEKIISTPDSKVIAMVVPTNEELMIAKDTKEIIEKGLDELKI

SEQ ID NO: 1089 - DNA, 1251 bp, synthetic construct
  misc_feature 1..1251: note = variant of acetate kinase from Marinitoga sp.38H-ov
  source 1..1251: mol_type = other DNA
atgcaccatcatcatcatcatggcggtagcggcatgaaagttctggtgattaattctggtagctcctccatcaaatatcagctcctcgatgagaccaacgaaaaggtattagcgaaaggcttggtcgagcgcattggcatcgacggttcgcgtatcgtgcataaagttaacggcgaagggcacgtgctggaacatgagattaaaaatcacgaaattggacttaaattggtcctggatcttcttacggacgaaaaatacggtgtgttgaaggatctcaaagaaatcgatgcagttgggcatcgcgtagtacatggcggcgagcgttttgccagtagcgtgaagattactgacgaagtcttaaagaccatcgagacgttgtcgttcttagctccgttacacaatccagcgaacattatgggtatcaagagcagcatgaaagtgttaccgggtgtgcctcaagttgccgtctttgatacagcgttccaccagaagatgccggagaaagcctatttgtacgcaatcccctatgagtactacgagaaatataaaattcgccgctatgggtttcatggaacctcacatcgttatgtgagtaaacgtgctgcggaaattatgggcaaaccgtacgatcagctcaagatcattaccgttcacgtgggtaacggcgcatcagttgcggcggtgaagaatggcgtatctgttgacacttccatgggtttcacaccacttgaaggtcttgtcatgggcacgcgcagcggcgatattgatccggccatcgtggaatttcttgagaaagaagaaggattgtcggccaaagaagtcgtcaacatcctcaacaagaaatctggtgtgtatgggctcaccaaaggctttagtagggacatgcgtgacattgtgctgaaggctattgaaggtgatcctgtatgccgccttgcattagatgtgtattattatcgtatcgcgaaatatattggcgcatacgctgcggccatgaacggtgttgacgcgatcgtctttaccgcaggagttggcgaaaatagcccgattatgcgcgaagaaattattgagaactacttgggctacttagggatcaagatcgataaagaagccaatgacttcaaaggtgaggagaagatcatttcaacgcccgattccaaagtgattgcgatggtagttccgaccaacgaggagctcatgatcgccaaagacacgaaagaaatcattgagaaagggttggacgagcttaagatc

SEQ ID NO: 1090 - protein, 417 aa, synthetic construct
  REGION 1..417: note = variant of acetate kinase from Marinitoga sp.38H-ov
MHHHHHHGGSGMKVLVINSGSSSIKYQLLDETNEKVLAKGLVERIGIDGSRIVHKVNGEGHVLEHEIKNHEIGLKLVLDLLTDEKYGVLKDLKEIDAVGHRVVHGGERFASSVKITDEVLKTIETLSFLAPLHNPANIMGIKSSMKVLPGVPQVAVFDTAFHQKMPEKAYLYAIPYEYYEKYKIRRYGFHGTSHRYVSKRAAEIMGKPYDQLKIITVHVGNGASVAAVKNGVSVDTSMGFTPLEGLVMGTRSGDIDPAIVEFLEKEEGLSAKEVVNILNKKSGVYGLTKGFSRDMRDIVLKAIEGDPVCRLALDVYYYRIAKYIGAYAAAMNGVDAIVFTAGVGENSPIMREEIIENYLGYLGIKIDKEANDFKGEEKIISTPDSKVIAMVVPTNEELMIAKDTKEIIEKGLDELKI

SEQ ID NO: 1091 - DNA, 1251 bp, synthetic construct
  misc_feature 1..1251: note = variant of acetate kinase from Marinitoga sp.38H-ov
  source 1..1251: mol_type = other DNA
atgcaccatcatcatcatcatggcggtagcggcatgaaagttctggtgattaattctggtagctcctccatcaaatatcagctcctcgatatgaccaacgaaaaggtattagcgaaaggcttggtcgagcgcattggcatcgacggttcgcgtatcgtgcataaagttaacggcgaagggcacgtgctggaacatgagattaaaaatcacgaaattggacttaaattggtcctggatcttcttacggacgaaaaatacggtgtgttgaaggatctcaaagaaatcgatgcagttgggcatcgcgtagtacatggcggcgagcgttttgccagtagcgtgaagattactgacgaagtcttaaagaccatcgagacgttgtcgttcttagctccgttacacaatccagcgaacattatgggtatcaagagcagcatgaaagtgttaccgggtgtgcctcaagttgccgtctttgatacagcgttccaccagaagatgccggagaaagcctatttgtacgcaatcccctatgagtactacacgaaatataaaattcgccgctatgggtttcatggaacctcacatcgttatgtgagtaaacgtgctgcggaaattatgggcaaaccgtacgatcagctcaagatcattaccgttcacgtgggtaacggcgcatcagttgcggcggtgaagaatggcgtatctgttgacacttccatgggtttcacaccacttgaaggtcttgtcatgggcacgcgcagcggcgatattgatccggccatcgtggaatttcttgagaaagaagaaggattgtcggccaaagaagtcgtcaacatcctcaacaagaaatctggtgtgtatgggctcaccaaaggctttagtagggacatgcgtgacattgtgctgaaggctattgaaggtgatcctgtatgccgccttgcattagatgtgtattattatcgtatcgcgaaatatattggcgcatacgctgcggccatgaacggtgttgacgcgatcgtctttaccgcaggagttggcgaaaatagcccgattatgcgcgaagaaattattgagaactacttgggctacttagggatcaagatcgataaagaagccaatgacttcaaaggtgaggagaagatcatttcaacgcccgattccaaagtgattgcgatggtagttccgaccaacgaggagctcatgatcgccaaagacacgaaagaaatcattgagaaagggttggacgagcttaagatc

SEQ ID NO: 1092 - protein, 417 aa, synthetic construct
  REGION 1..417: note = variant of acetate kinase from Marinitoga sp.38H-ov
MHHHHHHGGSGMKVLVINSGSSSIKYQLLDMTNEKVLAKGLVERIGIDGSRIVHKVNGEGHVLEHEIKNHEIGLKLVLDLLTDEKYGVLKDLKEIDAVGHRVVHGGERFASSVKITDEVLKTIETLSFLAPLHNPANIMGIKSSMKVLPGVPQVAVFDTAFHQKMPEKAYLYAIPYEYYTKYKIRRYGFHGTSHRYVSKRAAEIMGKPYDQLKIITVHVGNGASVAAVKNGVSVDTSMGFTPLEGLVMGTRSGDIDPAIVEFLEKEEGLSAKEVVNILNKKSGVYGLTKGFSRDMRDIVLKAIEGDPVCRLALDVYYYRIAKYIGAYAAAMNGVDAIVFTAGVGENSPIMREEIIENYLGYLGIKIDKEANDFKGEEKIISTPDSKVIAMVVPTNEELMIAKDTKEIIEKGLDELKI

SEQ ID NO: 1093 - DNA, 1251 bp, synthetic construct
  misc_feature 1..1251: note = variant of acetate kinase from Marinitoga sp.38H-ov
  source 1..1251: mol_type = other DNA
atgcaccatcatcatcatcatggcggtagcggcatgaaagttctggtgattaattctggtagctcctccatcaaatatcagctcctcgatatgaccaacgaaaaggtattagcgaaaggcttggtcgagcgcattggcatcgacggttcgcgtatcgtgcataaagttaacggcgaagggcacgtgctggaacatgagattaaaaatcacgaaattggacttaaattggtcctggatcttcttacggacgaaaaatacggtgtgttgaaggatctcaaagaaatcgatgcagttgggcatcgcgtagtacatggcggcgagcgttttgccagtagcgtgaagattactgacgaagtcttaaagaccatcgagacgttgtcgttcttagctccgttacacaatccagcgaacattatgggtatcaagagcagcatgaaagtgttaccgggtgtgcctcaagttgccgtctttgatacagcgttccaccagaagatgccggagaaagcctatttgtacgcaatcccctatgagtactacgagaaatataaaattcgccgctatgggtttcatggaacctcacatcgttatgtgagtaaacgtgctgcggaaattatgggcaaaccgtacgatcagtataagatcattaccgttcacgtgggtaacggcgcatcagttgcggcggtgaagaatggcgtatctgttgacacttccatgggtttcacaccacttgaaggtcttgtcatgggcacgcgcagcggcgatattgatccggccatcgtggaatttcttgagaaagaagaaggattgtcggccaaagaagtcgtcaacatcctcaacaagaaatctggtgtgtatgggctcaccaaaggctttagtagggacatgcgtgacattgtgctgaaggctattgaaggtgatcctgtatgccgccttgcattagatgtgtattattatcgtatcgcgaaatatattggcgcatacgctgcggccatgaacggtgttgacgcgatcgtctttaccgcaggagttggcgaaaatagcccgattatgcgcgaagaaattattgagaactacttgggctacttagggatcaagatcgataaagaagccaatgacttcaaaggtgaggagaagatcatttcaacgcccgattccaaagtgattgcgatggtagttccgaccaacgaggagctcatgatcgccaaagacacgaaagaaatcattgagaaagggttggacgagcttaagatc

SEQ ID NO: 1094 - protein, 417 aa, synthetic construct
  REGION 1..417: note = variant of acetate kinase from Marinitoga sp.38H-ov
MHHHHHHGGSGMKVLVINSGSSSIKYQLLDMTNEKVLAKGLVERIGIDGSRIVHKVNGEGHVLEHEIKNHEIGLKLVLDLLTDEKYGVLKDLKEIDAVGHRVVHGGERFASSVKITDEVLKTIETLSFLAPLHNPANIMGIKSSMKVLPGVPQVAVFDTAFHQKMPEKAYLYAIPYEYYEKYKIRRYGFHGTSHRYVSKRAAEIMGKPYDQYKIITVHVGNGASVAAVKNGVSVDTSMGFTPLEGLVMGTRSGDIDPAIVEFLEKEEGLSAKEVVNILNKKSGVYGLTKGFSRDMRDIVLKAIEGDPVCRLALDVYYYRIAKYIGAYAAAMNGVDAIVFTAGVGENSPIMREEIIENYLGYLGIKIDKEANDFKGEEKIISTPDSKVIAMVVPTNEELMIAKDTKEIIEKGLDELKI

SEQ ID NO: 1095 - DNA, 1251 bp, synthetic construct
  misc_feature 1..1251: note = variant of acetate kinase from Marinitoga sp.38H-ov
  source 1..1251: mol_type = other DNA
atgcaccatcatcatcatcatggcggtagcggcatgaaagttctggtgattaattctggtagctcctccatcaaatatcagctcctcgatatgaccaacgaaaaggtattagcgaaaggcttggtcgagcgcattggcatcgacggttcgcgtatcgtgcataaagttaacggcgaagggcacgtgctggaacatgagattaaaaatcacgaaattggacttaaattggtcctggatcttcttacggacgaaaaatacggtgtgttgaaggatctcaaagaaatcgatgcagttgggcatcgcgtagtacatggcggcgagcgttttgccagtagcgtgaagattactgacgaagtcttaaagaccatcgagacgttgtcgttcttagctccgttacacaatccagcgaacattatgggtatcaagagcagcatgaaagtgttaccgggtgtgcctcaagttgccgtctttgatacagcgttccaccagaagatgccggagaaagcctatttgtacgcaatcccctatgagtactacgagaaatataaaattcgccgctatgggtttcatggaacctcacatcgttatgtgagtaaacgttgggcggaaattatgggcaaaccgtacgatcagctcaagatcattaccgttcacgtgggtaacggcgcatcagttgcggcggtgaagaatggcgtatctgttgacacttccatgggtttcacaccacttgaaggtcttgtcatgggcacgcgcagcggcgatattgatccggccatcgtggaatttcttgagaaagaagaaggattgtcggccaaagaagtcgtcaacatcctcaacaagaaatctggtgtgtatgggctcaccaaaggctttagtagggacatgcgtgacattgtgctgaaggctattgaaggtgatcctgtatgccgccttgcattagatgtgtattattatcgtatcgcgaaatatattggcgcatacgctgcggccatgaacggtgttgacgcgatcgtctttaccgcaggagttggcgaaaatagcccgattatgcgcgaagaaattattgagaactacttgggctacttagggatcaagatcgataaagaagccaatgacttcaaaggtgaggagaagatcatttcaacgcccgattccaaagtgattgcgatggtagttccgaccaacgaggagctcatgatcgccaaagacacgaaagaaatcattgagaaagggttggacgagcttaagatc

SEQ ID NO: 1096 - protein, 417 aa, synthetic construct
  REGION 1..417: note = variant of acetate kinase from Marinitoga sp.38H-ov
MHHHHHHGGSGMKVLVINSGSSSIKYQLLDMTNEKVLAKGLVERIGIDGSRIVHKVNGEGHVLEHEIKNHEIGLKLVLDLLTDEKYGVLKDLKEIDAVGHRVVHGGERFASSVKITDEVLKTIETLSFLAPLHNPANIMGIKSSMKVLPGVPQVAVFDTAFHQKMPEKAYLYAIPYEYYEKYKIRRYGFHGTSHRYVSKRWAEIMGKPYDQLKIITVHVGNGASVAAVKNGVSVDTSMGFTPLEGLVMGTRSGDIDPAIVEFLEKEEGLSAKEVVNILNKKSGVYGLTKGFSRDMRDIVLKAIEGDPVCRLALDVYYYRIAKYIGAYAAAMNGVDAIVFTAGVGENSPIMREEIIENYLGYLGIKIDKEANDFKGEEKIISTPDSKVIAMVVPTNEELMIAKDTKEIIEKGLDELKI

SEQ ID NO: 1097 - DNA, 1251 bp, synthetic construct
  misc_feature 1..1251: note = variant of acetate kinase from Marinitoga sp.38H-ov
  source 1..1251: mol_type = other DNA
atgcaccatcatcatcatcatggcggtagcggcatgaaagttctggtgattaattctggtagctcctccatcaaatatcagctcctcgatatgaccaacgaaaaggtattagcgaaaggcttggtcgagcgcattggcatcgacggttcgcgtatcgtgcataaagttaacggcgaagggcacgtgctggaacatgagattaaaaatcacgaaattggacttaaattggtcctggatcttcttacggacgaaaaatacggtgtgttgaaggatctcaaagaaatcgatgcagttgggcatcgcgtagtacatggcggcgagcgttttgccagtagcgtgaagattactgacgaagtcttaaagaccatcgagacgttgtcgttcttagctccgttacacaatccagcgaacattatgggtatcaagagcagcatgaaagtgttaccgggtgtgcctcaagttgccgtctttgatacagcgttccaccagaagatgccggagaaagcctatttgtacgcaatcccctatgagtactacgagaaatataaaattcgccgctatgggtttcatggaacctcacatcgttatgtgagtaaacgtgctgcggaaattatgggcaaaccgtacgatcagctcaagatcattaccgttcacgtgggtaacggcgcatcagttgcggcggtgaagaatggcgtatctgttgacacttccatgggtttcacaccacttgaaggtcttgtcatgggcacgcgcagcggcgatattgatccggccatcgtggaatttcttgagaaagaagaaggattgtcggccaaagaagtcgtcaacatcctcaacaagaaatctggtgtgtatgggctcaccaaaggctttagtagggacatgcgtgacattgtgctgaaggctattgaaggtgatcctgtatgccgccttgcattagatgtgtattattatcgtatcgcgaaatatattggcgcatacgctgcggccatgaacggtgttgacgcgatcgtctttaccgcaggagttggcgaaaatagcccgattatgcgcgaagaaattattgagaactacttgggctacttagggatcaagatcgataaagaagccaatgacttcaaaggtgaggagaagatcatttcaacgcccgattccaaagtgattgcgatggtagttccgaccaacgaggagctcatgatcgccgaggacacgaaagaaatcattgagaaagggttggacgagcttaagatc

SEQ ID NO: 1098 - protein, 417 aa, synthetic construct
  REGION 1..417: note = variant of acetate kinase from Marinitoga sp.38H-ov
MHHHHHHGGSGMKVLVINSGSSSIKYQLLDMTNEKVLAKGLVERIGIDGSRIVHKVNGEGHVLEHEIKNHEIGLKLVLDLLTDEKYGVLKDLKEIDAVGHRVVHGGERFASSVKITDEVLKTIETLSFLAPLHNPANIMGIKSSMKVLPGVPQVAVFDTAFHQKMPEKAYLYAIPYEYYEKYKIRRYGFHGTSHRYVSKRAAEIMGKPYDQLKIITVHVGNGASVAAVKNGVSVDTSMGFTPLEGLVMGTRSGDIDPAIVEFLEKEEGLSAKEVVNILNKKSGVYGLTKGFSRDMRDIVLKAIEGDPVCRLALDVYYYRIAKYIGAYAAAMNGVDAIVFTAGVGENSPIMREEIIENYLGYLGIKIDKEANDFKGEEKIISTPDSKVIAMVVPTNEELMIAEDTKEIIEKGLDELKI

SEQ ID NO: 1099 - DNA, 1251 bp, synthetic construct
  misc_feature 1..1251: note = variant of acetate kinase from Marinitoga sp.38H-ov
  source 1..1251: mol_type = other DNA
atgcaccatcatcatcatcatggcggtagcggcatgaaagttctggtgattaattctggtagctcctccatcaaatatcagctcctcgatatgaccaacgaaaaggtattagcgaaaggcttggtcgagcgcattggcatcgacggttcgcgtatcgtgcataaagttaacggcgaagggcacgtgctggaacatgagattaaaaatcacgaaattggacttaaattggtcctggatcttcttacggacgaaaaatacggtgtgttgaaggatctcaaagaaatcgatgcagttgggcatcgcgtagtacatggcggcgagcgttttgccagtagcgtgaagattactgacgaagtcttaaagaccatcgagacgttgtcgttcttagctccgttacacaatccagcgaacattatgggtatcaagagcagcatgaaagtgttaccgggtgtgcctcaagttgccgtctttgatacagcgttccaccagaagatgccggagaaagcctatttgtacgcaatcccctatgagtactacgagaaatataaaattcgccgctatgggtttcatggaacctcacatcgttatgtgagtaaacgtgctgcggaaattatgggcgatccgtacgatcagctcaagatcattaccgttcacgtgggtaacggcgcatcagttgcggcggtgaagaatggcgtatctgttgacacttccatgggtttcacaccacttgaaggtcttgtcatgggcacgcgcagcggcgatattgatccggccatcgtggaatttcttgagaaagaagaaggattgtcggccaaagaagtcgtcaacatcctcaacaagaaatctggtgtgtatgggctcaccaaaggctttagtagggacatgcgtgacattgtgctgaaggctattgaaggtgatcctgtatgccgccttgcattagatgtgtattattatcgtatcgcgaaatatattggcgcatacgctgcggccatgaacggtgttgacgcgatcgtctttaccgcaggagttggcgaaaatagcccgattatgcgcgaagaaattattgagaactacttgggctacttagggatcaagatcgataaagaagccaatgacttcaaaggtgaggagaagatcatttcaacgcccgattccaaagtgattgcgatggtagttccgaccaacgaggagctcatgatcgccaaagacacgaaagaaatcattgagaaagggttggacgagcttaagatc

SEQ ID NO: 1100 - protein, 417 aa, synthetic construct
  REGION 1..417: note = variant of acetate kinase from Marinitoga sp.38H-ov
MHHHHHHGGSGMKVLVINSGSSSIKYQLLDMTNEKVLAKGLVERIGIDGSRIVHKVNGEGHVLEHEIKNHEIGLKLVLDLLTDEKYGVLKDLKEIDAVGHRVVHGGERFASSVKITDEVLKTIETLSFLAPLHNPANIMGIKSSMKVLPGVPQVAVFDTAFHQKMPEKAYLYAIPYEYYEKYKIRRYGFHGTSHRYVSKRAAEIMGDPYDQLKIITVHVGNGASVAAVKNGVSVDTSMGFTPLEGLVMGTRSGDIDPAIVEFLEKEEGLSAKEVVNILNKKSGVYGLTKGFSRDMRDIVLKAIEGDPVCRLALDVYYYRIAKYIGAYAAAMNGVDAIVFTAGVGENSPIMREEIIENYLGYLGIKIDKEANDFKGEEKIISTPDSKVIAMVVPTNEELMIAKDTKEIIEKGLDELKI

SEQ ID NO: 1101 - DNA, 1251 bp, synthetic construct
  misc_feature 1..1251: note = variant of acetate kinase from Marinitoga sp.38H-ov
  source 1..1251: mol_type = other DNA
atgcaccatcatcatcatcatggcggtagcggcatgaaagttctggtgattaattctggtagctcctccatcaaatatcagctcctcgatatgaccaacgaaaaggtattagcgaaaggcttggtcgagcgcattggcatcgacggttcgcgtatcgtgcataaagttaacggcgaagggcacgtgctggaacatgagattaaaaatcacgaaattggacttaaattggtcctggatcttcttacggacgaaaaatacggtgtgttgaaggatctcaaagaaatcgatgcagttgggcatcgcgtagtacatggcggcgagcgttttgccagtagcgtgaagattactgacgaagtcttaaagaccatcgagacgttgttgttcttagctccgttacacaatccagcgaacattatgggtatcaagagcagcatgaaagtgttaccgggtgtgcctcaagttgccgtctttgatacagcgttccaccagaagatgccggagaaagcctatttgtacgcaatcccctatgagtactacgagaaatataaaattcgccgctatgggtttcatggaacctcacatcgttatgtgagtaaacgtgctgcggaaattatgggcaaaccgtacgatcagctcaagatcattaccgttcacgtgggtaacggcgcatcagttgcggcggtgaagaatggcgtatctgttgacacttccatgggtttcacaccacttgaaggtcttgtcatgggcacgcgcagcggcgatattgatccggccatcgtggaatttcttgagaaagaagaaggattgtcggccaaagaagtcgtcaacatcctcaacaagaaatctggtgtgtatgggctcaccaaaggctttagtagggacatgcgtgacattgtgctgaaggctattgaaggtgatcctgtatgccgccttgcattagatgtgtattattatcgtatcgcgaaatatattggcgcatacgctgcggccatgaacggtgttgacgcgatcgtctttaccgcaggagttggcgaaaatagcccgattatgcgcgaagaaattattgagaactacttgggctacttagggatcaagatcgataaagaagccaatgacttcaaaggtgaggagaagatcatttcaacgcccgattccaaagtgattgcgatggtagttccgaccaacgaggagctcatgatcgccaaagacacgaaagaaatcattgagaaagggttggacgagcttaagatc

SEQ ID NO: 1102 - protein, 417 aa, synthetic construct
  REGION 1..417: note = variant of acetate kinase from Marinitoga sp.38H-ov
MHHHHHHGGSGMKVLVINSGSSSIKYQLLDMTNEKVLAKGLVERIGIDGSRIVHKVNGEGHVLEHEIKNHEIGLKLVLDLLTDEKYGVLKDLKEIDAVGHRVVHGGERFASSVKITDEVLKTIETLLFLAPLHNPANIMGIKSSMKVLPGVPQVAVFDTAFHQKMPEKAYLYAIPYEYYEKYKIRRYGFHGTSHRYVSKRAAEIMGKPYDQLKIITVHVGNGASVAAVKNGVSVDTSMGFTPLEGLVMGTRSGDIDPAIVEFLEKEEGLSAKEVVNILNKKSGVYGLTKGFSRDMRDIVLKAIEGDPVCRLALDVYYYRIAKYIGAYAAAMNGVDAIVFTAGVGENSPIMREEIIENYLGYLGIKIDKEANDFKGEEKIISTPDSKVIAMVVPTNEELMIAKDTKEIIEKGLDELKI

SEQ ID NO: 1103 - DNA, 1251 bp, synthetic construct
  misc_feature 1..1251: note = variant of acetate kinase from Marinitoga sp.38H-ov
  source 1..1251: mol_type = other DNA
atgcaccatcatcatcatcatggcggtagcggcatgaaagttctggtgattaattctggtagctcctccatcaaatatcagctcctcgatatgaccaacgaaaaggtattagcgaaaggcttggtcgagcgcattggcatcgacggttcgcgtatcgtgcataaagttaacggcgaagggcacgtgctggaacatgagattaaaaatcacgaaattggacttaaattggtcctggatcttcttacggacgaaaaatacggtgtgttgaaggatctcaaagaaatcgatgcagttgggcatcgcgtagtacatggcggcgagcgttttgccagtagcgtgaagattactgacgaagtcttaaagaccatcgagacgttgtcgttcttagctccgttacacaatccagcgaacattatgggtatcaagagcagcatgaaagtgttaccgggtgtgcctcaagttgccgtctttgatacagcgttccaccagaagatgccggagaaagcctatttgtacgcaatcccctatgagtactacgagaaatataaaattcgccgctatgggtttcatggaacctcacatcgttatgtgagtttgcgtgctgcggaaattatgggcaaaccgtacgatcagctcaagatcattaccgttcacgtgggtaacggcgcatcagttgcggcggtgaagaatggcgtatctgttgacacttccatgggtttcacaccacttgaaggtcttgtcatgggcacgcgcagcggcgatattgatccggccatcgtggaatttcttgagaaagaagaaggattgtcggccaaagaagtcgtcaacatcctcaacaagaaatctggtgtgtatgggctcaccaaaggctttagtagggacatgcgtgacattgtgctgaaggctattgaaggtgatcctgtatgccgccttgcattagatgtgtattattatcgtatcgcgaaatatattggcgcatacgctgcggccatgaacggtgttgacgcgatcgtctttaccgcaggagttggcgaaaatagcccgattatgcgcgaagaaattattgagaactacttgggctacttagggatcaagatcgataaagaagccaatgacttcaaaggtgaggagaagatcatttcaacgcccgattccaaagtgattgcgatggtagttccgaccaacgaggagctcatgatcgccaaagacacgaaagaaatcattgagaaagggttggacgagcttaagatc

SEQ ID NO: 1104 - protein, 417 aa, synthetic construct
  REGION 1..417: note = variant of acetate kinase from Marinitoga sp.38H-ov
MHHHHHHGGSGMKVLVINSGSSSIKYQLLDMTNEKVLAKGLVERIGIDGSRIVHKVNGEGHVLEHEIKNHEIGLKLVLDLLTDEKYGVLKDLKEIDAVGHRVVHGGERFASSVKITDEVLKTIETLSFLAPLHNPANIMGIKSSMKVLPGVPQVAVFDTAFHQKMPEKAYLYAIPYEYYEKYKIRRYGFHGTSHRYVSLRAAEIMGKPYDQLKIITVHVGNGASVAAVKNGVSVDTSMGFTPLEGLVMGTRSGDIDPAIVEFLEKEEGLSAKEVVNILNKKSGVYGLTKGFSRDMRDIVLKAIEGDPVCRLALDVYYYRIAKYIGAYAAAMNGVDAIVFTAGVGENSPIMREEIIENYLGYLGIKIDKEANDFKGEEKIISTPDSKVIAMVVPTNEELMIAKDTKEIIEKGLDELKI

SEQ ID NO: 1105 - DNA, 1251 bp, synthetic construct
  misc_feature 1..1251: note = variant of acetate kinase from Marinitoga sp.38H-ov
  source 1..1251: mol_type = other DNA
atgcaccatcatcatcatcatggcggtagcggcatgaaagttctggtgattaattctggtagctcctccatcaaatatcagctcctcgatatgaccaacgaaaaggtattagcgaaaggcttggtcgagcgcattggcatcgacggttcgcgtatcgtgcataaagttaacggcgaagggcacgtgctggaacatgagattaaaaatcacgaaattggacttaaattggtcctggatcttcttacggacgaaaaatacggtgtgttgaaggatctcaaagaaatcgatgcagttgggcatcgcgtagtacatggcggcgagcgttttgccagtagcgtgaagattactgacgaagtcttaaagaccatcgagacgttgtcgttcttagctccgttacacaatccagcgaacattatgggtatcaagagcagcatgaaagtgttaccgggtgtgcctcaagttgccgtctttgatacagcgttccaccagaagatgccggagaaagcctatttgtacgcaatcccctatgagtactacgagaaatataaaattcgccgctatgggtttcatggaacctcacatcgttatgtgagtaaacgtgctgcggaaattatgggcaaaccgtactggcagctcaagatcattaccgttcacgtgggtaacggcgcatcagttgcggcggtgaagaatggcgtatctgttgacacttccatgggtttcacaccacttgaaggtcttgtcatgggcacgcgcagcggcgatattgatccggccatcgtggaatttcttgagaaagaagaaggattgtcggccaaagaagtcgtcaacatcctcaacaagaaatctggtgtgtatgggctcaccaaaggctttagtagggacatgcgtgacattgtgctgaaggctattgaaggtgatcctgtatgccgccttgcattagatgtgtattattatcgtatcgcgaaatatattggcgcatacgctgcggccatgaacggtgttgacgcgatcgtctttaccgcaggagttggcgaaaatagcccgattatgcgcgaagaaattattgagaactacttgggctacttagggatcaagatcgataaagaagccaatgacttcaaaggtgaggagaagatcatttcaacgcccgattccaaagtgattgcgatggtagttccgaccaacgaggagctcatgatcgccaaagacacgaaagaaatcattgagaaagggttggacgagcttaagatc

SEQ ID NO: 1106 - protein, 417 aa, synthetic construct
  REGION 1..417: note = variant of acetate kinase from Marinitoga sp.38H-ov
MHHHHHHGGSGMKVLVINSGSSSIKYQLLDMTNEKVLAKGLVERIGIDGSRIVHKVNGEGHVLEHEIKNHEIGLKLVLDLLTDEKYGVLKDLKEIDAVGHRVVHGGERFASSVKITDEVLKTIETLSFLAPLHNPANIMGIKSSMKVLPGVPQVAVFDTAFHQKMPEKAYLYAIPYEYYEKYKIRRYGFHGTSHRYVSKRAAEIMGKPYWQLKIITVHVGNGASVAAVKNGVSVDTSMGFTPLEGLVMGTRSGDIDPAIVEFLEKEEGLSAKEVVNILNKKSGVYGLTKGFSRDMRDIVLKAIEGDPVCRLALDVYYYRIAKYIGAYAAAMNGVDAIVFTAGVGENSPIMREEIIENYLGYLGIKIDKEANDFKGEEKIISTPDSKVIAMVVPTNEELMIAKDTKEIIEKGLDELKI

SEQ ID NO: 1107 - DNA, 1251 bp, synthetic construct
  misc_feature 1..1251: note = variant of acetate kinase from Marinitoga sp.38H-ov
  source 1..1251: mol_type = other DNA
atgcaccatcatcatcatcatggcggtagcggcatgaaagttctggtgattaattctggtagctcctccatcaaatatcagctcctcgatatgaccaacgaaaaggtattagcgaaaggcttggtcgagcgcattggcatcgacggttcgcgtatcgtgcataaagttaacggcgaagggcacgtgctggaacatgagattaaaaatcacgaaattggacttaaattggtcctggatcttcttacggacgaaaaatacggtgtgttgaaggatctcaaagaaatcgatgcagttgggcatcgcgtagtacatggcggcgagcgttttgccagtagcgtgaagattactgacgaagtcttaaagaccatcgagacgttgtcgttcttagctccgttacacaatccagcgaacattatgggtatcaagagcagcatgaaagtgttaccgggtgtgcctcaagttgccgtctttgatacagcgttccaccagaagatgccggagaaagcctatttgtacgcaatcccctatgagtactacgagaaatataaaattcgccgctatgggtttcatggaacctcacatcgttatgtgagtaaacgtgctgcggaaattatgggcaaaccgcttgatcagctcaagatcattaccgttcacgtgggtaacggcgcatcagttgcggcggtgaagaatggcgtatctgttgacacttccatgggtttcacaccacttgaaggtcttgtcatgggcacgcgcagcggcgatattgatccggccatcgtggaatttcttgagaaagaagaaggattgtcggccaaagaagtcgtcaacatcctcaacaagaaatctggtgtgtatgggctcaccaaaggctttagtagggacatgcgtgacattgtgctgaaggctattgaaggtgatcctgtatgccgccttgcattagatgtgtattattatcgtatcgcgaaatatattggcgcatacgctgcggccatgaacggtgttgacgcgatcgtctttaccgcaggagttggcgaaaatagcccgattatgcgcgaagaaattattgagaactacttgggctacttagggatcaagatcgataaagaagccaatgacttcaaaggtgaggagaagatcatttcaacgcccgattccaaagtgattgcgatggtagttccgaccaacgaggagctcatgatcgccaaagacacgaaagaaatcattgagaaagggttggacgagcttaagatc

SEQ ID NO: 1108 - protein, 417 aa, synthetic construct
  REGION 1..417: note = variant of acetate kinase from Marinitoga sp.38H-ov
MHHHHHHGGSGMKVLVINSGSSSIKYQLLDMTNEKVLAKGLVERIGIDGSRIVHKVNGEGHVLEHEIKNHEIGLKLVLDLLTDEKYGVLKDLKEIDAVGHRVVHGGERFASSVKITDEVLKTIETLSFLAPLHNPANIMGIKSSMKVLPGVPQVAVFDTAFHQKMPEKAYLYAIPYEYYEKYKIRRYGFHGTSHRYVSKRAAEIMGKPLDQLKIITVHVGNGASVAAVKNGVSVDTSMGFTPLEGLVMGTRSGDIDPAIVEFLEKEEGLSAKEVVNILNKKSGVYGLTKGFSRDMRDIVLKAIEGDPVCRLALDVYYYRIAKYIGAYAAAMNGVDAIVFTAGVGENSPIMREEIIENYLGYLGIKIDKEANDFKGEEKIISTPDSKVIAMVVPTNEELMIAKDTKEIIEKGLDELKI

SEQ ID NO: 1109 - DNA, 1251 bp, synthetic construct
  misc_feature 1..1251: note = variant of acetate kinase from Marinitoga sp.38H-ov
  source 1..1251: mol_type = other DNA
atgcaccatcatcatcatcatggcggtagcggcatgaaaagtctggtgattaattctggtagctcctccatcaaatatcagctcctcgatatgaccaacgaaaaggtattagcgaaaggcttggtcgagcgcattggcatcgacggttcgcgtatcgtgcataaagttaacggcgaagggcacgtgctggaacatgagattaaaaatcacgaaattggacttaaattggtcctggatcttcttacggacgaaaaatacggtgtgttgaaggatctcaaagaaatcgatgcagttgggcatcgcgtagtacatggcggcgagcgttttgccagtagcgtgaagattactgacgaagtcttaaagaccatcgagacgttgtcgttcttagctccgttacacaatccagcgaacattatgggtatcaagagcagcatgaaagtgttaccgggtgtgcctcaagttgccgtctttgatacagcgttccaccagaagatgccggagaaagcctatttgtacgcaatcccctatgagtactacgagaaatataaaattcgccgctatgggtttcatggaacctcacatcgttatgtgagtaaacgtgctgcggaaattatgggcaaaccgtacgatcagctcaagatcattaccgttcacgtgggtaacggcgcatcagttgcggcggtgaagaatggcgtatctgttgacacttccatgggtttcacaccacttgaaggtcttgtcatgggcacgcgcagcggcgatattgatccggccatcgtggaatttcttgagaaagaagaaggattgtcggccaaagaagtcgtcaacatcctcaacaagaaatctggtgtgtatgggctcaccaaaggctttagtagggacatgcgtgacattgtgctgaaggctattgaaggtgatcctgtatgccgccttgcattagatgtgtattattatcgtatcgcgaaatatattggcgcatacgctgcggccatgaacggtgttgacgcgatcgtctttaccgcaggagttggcgaaaatagcccgattatgcgcgaagaaattattgagaactacttgggctacttagggatcaagatcgataaagaagccaatgacttcaaaggtgaggagaagatcatttcaacgcccgattccaaagtgattgcgatggtagttccgaccaacgaggagctcatgatcgccaaagacacgaaagaaatcattgagaaagggttggacgagcttaagatc

SEQ ID NO: 1110 - protein, 417 aa, synthetic construct
  REGION 1..417: note = variant of acetate kinase from Marinitoga sp.38H-ov
MHHHHHHGGSGMKSLVINSGSSSIKYQLLDMTNEKVLAKGLVERIGIDGSRIVHKVNGEGHVLEHEIKNHEIGLKLVLDLLTDEKYGVLKDLKEIDAVGHRVVHGGERFASSVKITDEVLKTIETLSFLAPLHNPANIMGIKSSMKVLPGVPQVAVFDTAFHQKMPEKAYLYAIPYEYYEKYKIRRYGFHGTSHRYVSKRAAEIMGKPYDQLKIITVHVGNGASVAAVKNGVSVDTSMGFTPLEGLVMGTRSGDIDPAIVEFLEKEEGLSAKEVVNILNKKSGVYGLTKGFSRDMRDIVLKAIEGDPVCRLALDVYYYRIAKYIGAYAAAMNGVDAIVFTAGVGENSPIMREEIIENYLGYLGIKIDKEANDFKGEEKIISTPDSKVIAMVVPTNEELMIAKDTKEIIEKGLDELKI

SEQ ID NO: 1111 - DNA, 1251 bp, synthetic construct
  misc_feature 1..1251: note = variant of acetate kinase from Marinitoga sp.38H-ov
  source 1..1251: mol_type = other DNA
atgcaccatcatcatcatcatggcggtagcggcatgaaagttctggtgattaattctggtagctcctccatcaaatatcagctcctcgatatgaccaacgaaaaggtattagcgaaaggcttggtcgagcgcattggcatcgacggttcgcgtatcgtgcataaagttaacggcgaagggcacgtgctggaacatgagattaaaaatcacgaaattggacttaaattggtcctggatcttcttacggacgaaaaatacggtgtgttgaaggatctcaaagaaatcgatgcagttgggcatcgcgtagtacatggcggcgagcgttttgccagtagcgtgaagattactgacgaagtcttaaagaccatcgagacgttgtcgttcttagctccgttacacaatccagcgaacattatgggtatcaagagcagcatgaaagtgttaccgggtgtgcctcaagttgccgtctttgatacagcgttccaccagaagatgccggagaaagcctatttgtacgcaatcccctatgagtactacgagaaatataaaattcgccgctatgggtttcatggaacctcacatcgttatgtgagtaaacgtgctgcggaaattatgggcaaaccgtacgatcagctcaagatcattaccgttcacgtgggtaacggcgcatcagttgcggcggtgaagaatggcgtatctgttgacacttccatgggtttcacaccacttgaaggtcttgtcatgggcacgcgcagcggcgatattgatccggccatcgtggaatttcttgagaaaattgaaggattgtcggccaaagaagtcgtcaacatcctcaacaagaaatctggtgtgtatgggctcaccaaaggctttagtagggacatgcgtgacattgtgctgaaggctattgaaggtgatcctgtatgccgccttgcattagatgtgtattattatcgtatcgcgaaatatattggcgcatacgctgcggccatgaacggtgttgacgcgatcgtctttaccgcaggagttggcgaaaatagcccgattatgcgcgaagaaattattgagaactacttgggctacttagggatcaagatcgataaagaagccaatgacttcaaaggtgaggagaagatcatttcaacgcccgattccaaagtgattgcgatggtagttccgaccaacgaggagctcatgatcgccaaagacacgaaagaaatcattgagaaagggttggacgagcttaagatc

SEQ ID NO: 1112 - protein, 417 aa, synthetic construct
  REGION 1..417: note = variant of acetate kinase from Marinitoga sp.38H-ov
MHHHHHHGGSGMKVLVINSGSSSIKYQLLDMTNEKVLAKGLVERIGIDGSRIVHKVNGEGHVLEHEIKNHEIGLKLVLDLLTDEKYGVLKDLKEIDAVGHRVVHGGERFASSVKITDEVLKTIETLSFLAPLHNPANIMGIKSSMKVLPGVPQVAVFDTAFHQKMPEKAYLYAIPYEYYEKYKIRRYGFHGTSHRYVSKRAAEIMGKPYDQLKIITVHVGNGASVAAVKNGVSVDTSMGFTPLEGLVMGTRSGDIDPAIVEFLEKIEGLSAKEVVNILNKKSGVYGLTKGFSRDMRDIVLKAIEGDPVCRLALDVYYYRIAKYIGAYAAAMNGVDAIVFTAGVGENSPIMREEIIENYLGYLGIKIDKEANDFKGEEKIISTPDSKVIAMVVPTNEELMIAKDTKEIIEKGLDELKI

SEQ ID NO: 1113 - DNA, 1251 bp, synthetic construct
  misc_feature 1..1251: note = variant of acetate kinase from Marinitoga sp.38H-ov
  source 1..1251: mol_type = other DNA
atgcaccatcatcatcatcatggcggtagcggcatgaaagttctggtgattaattctggtagctcctccatcaaatatcagctcctcgatatgaccaacgaaaaggtattagcgaaaggcttggtcgagcgcattggcatcgacggttcgcgtatcgtgcataaagttaacggcgaagggcacgtgctggaacatgagattaaaaatcacgaaattggacttaaattggtcctggatcttcttacggacgaaaaatacggtgtgttgaaggatctcaaagaaatcgatgcagttgggcatcgcgtagtacatggcggcgagcgttttgccagtagcgtgaagattactgacgaagtcttaaagaccatcgagacgttgtcgtggttagctccgttacacaatccagcgaacattatgggtatcaagagcagcatgaaagtgttaccgggtgtgcctcaagttgccgtctttgatacagcgttccaccagaagatgccggagaaagcctatttgtacgcaatcccctatgagtactacgagaaatataaaattcgccgctatgggtttcatggaacctcacatcgttatgtgagtaaacgtgctgcggaaattatgggcaaaccgtacgatcagctcaagatcattaccgttcacgtgggtaacggcgcatcagttgcggcggtgaagaatggcgtatctgttgacacttccatgggtttcacaccacttgaaggtcttgtcatgggcacgcgcagcggcgatattgatccggccatcgtggaatttcttgagaaagaagaaggattgtcggccaaagaagtcgtcaacatcctcaacaagaaatctggtgtgtatgggctcaccaaaggctttagtagggacatgcgtgacattgtgctgaaggctattgaaggtgatcctgtatgccgccttgcattagatgtgtattattatcgtatcgcgaaatatattggcgcatacgctgcggccatgaacggtgttgacgcgatcgtctttaccgcaggagttggcgaaaatagcccgattatgcgcgaagaaattattgagaactacttgggctacttagggatcaagatcgataaagaagccaatgacttcaaaggtgaggagaagatcatttcaacgcccgattccaaagtgattgcgatggtagttccgaccaacgaggagctcatgatcgccaaagacacgaaagaaatcattgagaaagggttggacgagcttaagatc

SEQ ID NO: 1114 - protein, 417 aa, synthetic construct
  REGION 1..417: note = variant of acetate kinase from Marinitoga sp.38H-ov
MHHHHHHGGSGMKVLVINSGSSSIKYQLLDMTNEKVLAKGLVERIGIDGSRIVHKVNGEGHVLEHEIKNHEIGLKLVLDLLTDEKYGVLKDLKEIDAVGHRVVHGGERFASSVKITDEVLKTIETLSWLAPLHNPANIMGIKSSMKVLPGVPQVAVFDTAFHQKMPEKAYLYAIPYEYYEKYKIRRYGFHGTSHRYVSKRAAEIMGKPYDQLKIITVHVGNGASVAAVKNGVSVDTSMGFTPLEGLVMGTRSGDIDPAIVEFLEKEEGLSAKEVVNILNKKSGVYGLTKGFSRDMRDIVLKAIEGDPVCRLALDVYYYRIAKYIGAYAAAMNGVDAIVFTAGVGENSPIMREEIIENYLGYLGIKIDKEANDFKGEEKIISTPDSKVIAMVVPTNEELMIAKDTKEIIEKGLDELKI

SEQ ID NO: 1115 - DNA, 1251 bp, synthetic construct
  misc_feature 1..1251: note = variant of acetate kinase from Marinitoga sp.38H-ov
  source 1..1251: mol_type = other DNA
atgcaccatcatcatcatcatggcggtagcggcatgaaagttctggtgattaattctggtagctcctccatcaaatatcagctcctcgatatgaccaacgaaaaggtattagcgaaaggcttggtcgagcgcattggcatcgacggttcgcgtatcgtgcataaagttaacggcgaagggcacgtgctggaacatgagattaaaaatcacgaaattggacttaaattggtcctggatcttcttacggacgaaaaatacggtgtgttgaaggatctcaaagaaatcgatgcagttgggcatcgcgtagtacatggcggcgagcgttttgccagtagcgtgaagattactgacgaagtcttaaagaccatcgagacgttgtcgttcttagctccgttacacaatccagcgaacattatgggtatcaagagcagcatgaaagtgttaccgggtgtgcctcaagttgccgtctttgatacagcgttccaccagaagatgccggagaaagcctatttgtacgcaatcccctatgagtactacgagaaatataaaattcgccgctatgggtttcatggaacctcacatcgttatgtgagtaaacgtgctgcggaaattatgggcaaaccgtacgatcagctcaagatcattaccgttcacgtgggtaacggcgcatcagttgcggcggtgaagaatggcgtatctgttgacacttccatgggtttcacaccacttgaaggtcttgtcatgggcacgcgcagcggcgatattgatccggccatcgtggaatttcttgagaaagaagaaggattgtcggccaaagaagtcgtcaacatcctcaacaagaaatctggtgtgtatgggctcaccaaaggctttagtagggacatgcgtgacattgtgctgaaggctattgaaggtgatcctgtatgccgccttgcattagatgtgtattattatcgtatcgcgaaatatattggcgcatacgctgtggccatgaacggtgttgacgcgatcgtctttaccgcaggagttggcgaaaatagcccgattatgcgcgaagaaattattgagaactacttgggctacttagggatcaagatcgataaagaagccaatgacttcaaaggtgaggagaagatcatttcaacgcccgattccaaagtgattgcgatggtagttccgaccaacgaggagctcatgatcgccaaagacacgaaagaaatcattgagaaagggttggacgagcttaagatc

SEQ ID NO: 1116 - protein, 417 aa, synthetic construct
  REGION 1..417: note = variant of acetate kinase from Marinitoga sp.38H-ov
MHHHHHHGGSGMKVLVINSGSSSIKYQLLDMTNEKVLAKGLVERIGIDGSRIVHKVNGEGHVLEHEIKNHEIGLKLVLDLLTDEKYGVLKDLKEIDAVGHRVVHGGERFASSVKITDEVLKTIETLSFLAPLHNPANIMGIKSSMKVLPGVPQVAVFDTAFHQKMPEKAYLYAIPYEYYEKYKIRRYGFHGTSHRYVSKRAAEIMGKPYDQLKIITVHVGNGASVAAVKNGVSVDTSMGFTPLEGLVMGTRSGDIDPAIVEFLEKEEGLSAKEVVNILNKKSGVYGLTKGFSRDMRDIVLKAIEGDPVCRLALDVYYYRIAKYIGAYAVAMNGVDAIVFTAGVGENSPIMREEIIENYLGYLGIKIDKEANDFKGEEKIISTPDSKVIAMVVPTNEELMIAKDTKEIIEKGLDELKI

SEQ ID NO: 1117 - DNA, 1251 bp, synthetic construct
  misc_feature 1..1251: note = variant of acetate kinase from Marinitoga sp.38H-ov
  source 1..1251: mol_type = other DNA
atgcaccatcatcatcatcatggcggtagcggcatgaaagttctggtgattaattctggtagctcctccatcaaatatcagctcctcgatatgaccaacgaaaaggtattagcgaaaggcttggtcgagcgcattggcatcgacggttcgcgtatcgtgcataaagttaacggcgaagggcacgtgctggaacatgagattaaaaatcacgaaattggacttaaattggtcctggatcttcttacggacgaaaaatacggtgtgttgaaggatctcaaagaaatcgatgcagttgggcatcgcgtagtacatggcggcgagcgttttgccagtagcgtgaagattactgacccggtcttaaagaccatcgagacgttgtcgttcttagctccgttacacaatccagcgaacattatgggtatcaagagcagcatgaaagtgttaccgggtgtgcctcaagttgccgtctttgatacagcgttccaccagaagatgccggagaaagcctatttgtacgcaatcccctatgagtactacgagaaatataaaattcgccgctatgggtttcatggaacctcacatcgttatgtgagtaaacgtgctgcggaaattatgggcaaaccgtacgatcagctcaagatcattaccgttcacgtgggtaacggcgcatcagttgcggcggtgaagaatggcgtatctgttgacacttccatgggtttcacaccacttgaaggtcttgtcatgggcacgcgcagcggcgatattgatccggccatcgtggaatttcttgagaaagaagaaggattgtcggccaaagaagtcgtcaacatcctcaacaagaaatctggtgtgtatgggctcaccaaaggctttagtagggacatgcgtgacattgtgctgaaggctattgaaggtgatcctgtatgccgccttgcattagatgtgtattattatcgtatcgcgaaatatattggcgcatacgctgcggccatgaacggtgttgacgcgatcgtctttaccgcaggagttggcgaaaatagcccgattatgcgcgaagaaattattgagaactacttgggctacttagggatcaagatcgataaagaagccaatgacttcaaaggtgaggagaagatcatttcaacgcccgattccaaagtgattgcgatggtagttccgaccaacgaggagctcatgatcgccaaagacacgaaagaaatcattgagaaagggttggacgagcttaagatc

SEQ ID NO: 1118 - protein, 417 aa, synthetic construct
  REGION 1..417: note = variant of acetate kinase from Marinitoga sp.38H-ov
MHHHHHHGGSGMKVLVINSGSSSIKYQLLDMTNEKVLAKGLVERIGIDGSRIVHKVNGEGHVLEHEIKNHEIGLKLVLDLLTDEKYGVLKDLKEIDAVGHRVVHGGERFASSVKITDPVLKTIETLSFLAPLHNPANIMGIKSSMKVLPGVPQVAVFDTAFHQKMPEKAYLYAIPYEYYEKYKIRRYGFHGTSHRYVSKRAAEIMGKPYDQLKIITVHVGNGASVAAVKNGVSVDTSMGFTPLEGLVMGTRSGDIDPAIVEFLEKEEGLSAKEVVNILNKKSGVYGLTKGFSRDMRDIVLKAIEGDPVCRLALDVYYYRIAKYIGAYAAAMNGVDAIVFTAGVGENSPIMREEIIENYLGYLGIKIDKEANDFKGEEKIISTPDSKVIAMVVPTNEELMIAKDTKEIIEKGLDELKI

SEQ ID NO: 1119 - DNA, 1251 bp, synthetic construct
  misc_feature 1..1251: note = variant of acetate kinase from Marinitoga sp.38H-ov
  source 1..1251: mol_type = other DNA
atgcaccatcatcatcatcatggcggtagcggcatgaaagttctggtgattaattctggtagctcctccatcaaatatcagctcctcgatatgaccaacgaaaaggtattagcgaaaggcttggtcgagcgcattggcatcgacggttcgcgtatcgtgcataaagttaacggcgaagggcacgtgctggaacatgagattaaaaatcacgaaattggacttaaattggtcctggatcttcttacggacgaaaaatacggtgtgttgaagcttctcaaagaaatcgatgcagttgggcatcgcgtagtacatggcggcgagcgttttgccagtagcgtgaagattactgacgaagtcttaaagaccatcgagacgttgtcgttcttagctccgttacacaatccagcgaacattatgggtatcaagagcagcatgaaagtgttaccgggtgtgcctcaagttgccgtctttgatacagcgttccaccagaagatgccggagaaagcctatttgtacgcaatcccctatgagtactacgagaaatataaaattcgccgctatgggtttcatggaacctcacatcgttatgtgagtaaacgtgctgcggaaattatgggcaaaccgtacgatcagctcaagatcattaccgttcacgtgggtaacggcgcatcagttgcggcggtgaagaatggcgtatctgttgacacttccatgggtttcacaccacttgaaggtcttgtcatgggcacgcgcagcggcgatattgatccggccatcgtggaatttcttgagaaagaagaaggattgtcggccaaagaagtcgtcaacatcctcaacaagaaatctggtgtgtatgggctcaccaaaggctttagtagggacatgcgtgacattgtgctgaaggctattgaaggtgatcctgtatgccgccttgcattagatgtgtattattatcgtatcgcgaaatatattggcgcatacgctgcggccatgaacggtgttgacgcgatcgtctttaccgcaggagttggcgaaaatagcccgattatgcgcgaagaaattattgagaactacttgggctacttagggatcaagatcgataaagaagccaatgacttcaaaggtgaggagaagatcatttcaacgcccgattccaaagtgattgcgatggtagttccgaccaacgaggagctcatgatcgccaaagacacgaaagaaatcattgagaaagggttggacgagcttaagatc

SEQ ID NO: 1120 - protein, 417 aa, synthetic construct
  REGION 1..417: note = variant of acetate kinase from Marinitoga sp.38H-ov
MHHHHHHGGSGMKVLVINSGSSSIKYQLLDMTNEKVLAKGLVERIGIDGSRIVHKVNGEGHVLEHEIKNHEIGLKLVLDLLTDEKYGVLKLLKEIDAVGHRVVHGGERFASSVKITDEVLKTIETLSFLAPLHNPANIMGIKSSMKVLPGVPQVAVFDTAFHQKMPEKAYLYAIPYEYYEKYKIRRYGFHGTSHRYVSKRAAEIMGKPYDQLKIITVHVGNGASVAAVKNGVSVDTSMGFTPLEGLVMGTRSGDIDPAIVEFLEKEEGLSAKEVVNILNKKSGVYGLTKGFSRDMRDIVLKAIEGDPVCRLALDVYYYRIAKYIGAYAAAMNGVDAIVFTAGVGENSPIMREEIIENYLGYLGIKIDKEANDFKGEEKIISTPDSKVIAMVVPTNEELMIAKDTKEIIEKGLDELKI

SEQ ID NO: 1121 - DNA, 1251 bp, synthetic construct
  misc_feature 1..1251: note = variant of acetate kinase from Marinitoga sp.38H-ov
  source 1..1251: mol_type = other DNA
atgcaccatcatcatcatcatggcggtagcggcatgaaagttctggtgattaattctggtagctcctccatcaaatatcagctcctcgatatgaccaacgaaaaggtattagcgaaaggcttggtcgagcgcattggcatcgacggttcgcgtatcgtgcataaagttaacggcgaagggcacgtgctggaacatgagattaaaaatcacgaaattggacttaaattggtcctggatcttcttacggacgaaaaataccgggtgttgaaggatctcaaagaaatcgatgcagttgggcatcgcgtagtacatggcggcgagcgttttgccagtagcgtgaagattactgacgaagtcttaaagaccatcgagacgttgtcgttcttagctccgttacacaatccagcgaacattatgggtatcaagagcagcatgaaagtgttaccgggtgtgcctcaagttgccgtctttgatacagcgttccaccagaagatgccggagaaagcctatttgtacgcaatcccctatgagtactacgagaaatataaaattcgccgctatgggtttcatggaacctcacatcgttatgtgagtaaacgtgctgcggaaattatgggcaaaccgtacgatcagctcaagatcattaccgttcacgtgggtaacggcgcatcagttgcggcggtgaagaatggcgtatctgttgacacttccatgggtttcacaccacttgaaggtcttgtcatgggcacgcgcagcggcgatattgatccggccatcgtggaatttcttgagaaagaagaaggattgtcggccaaagaagtcgtcaacatcctcaacaagaaatctggtgtgtatgggctcaccaaaggctttagtagggacatgcgtgacattgtgctgaaggctattgaaggtgatcctgtatgccgccttgcattagatgtgtattattatcgtatcgcgaaatatattggcgcatacgctgcggccatgaacggtgttgacgcgatcgtctttaccgcaggagttggcgaaaatagcccgattatgcgcgaagaaattattgagaactacttgggctacttagggatcaagatcgataaagaagccaatgacttcaaaggtgaggagaagatcatttcaacgcccgattccaaagtgattgcgatggtagttccgaccaacgaggagctcatgatcgccaaagacacgaaagaaatcattgagaaagggttggacgagcttaagatc

SEQ ID NO: 1122 - protein, 417 aa, synthetic construct
  REGION 1..417: note = variant of acetate kinase from Marinitoga sp.38H-ov
MHHHHHHGGSGMKVLVINSGSSSIKYQLLDMTNEKVLAKGLVERIGIDGSRIVHKVNGEGHVLEHEIKNHEIGLKLVLDLLTDEKYRVLKDLKEIDAVGHRVVHGGERFASSVKITDEVLKTIETLSFLAPLHNPANIMGIKSSMKVLPGVPQVAVFDTAFHQKMPEKAYLYAIPYEYYEKYKIRRYGFHGTSHRYVSKRAAEIMGKPYDQLKIITVHVGNGASVAAVKNGVSVDTSMGFTPLEGLVMGTRSGDIDPAIVEFLEKEEGLSAKEVVNILNKKSGVYGLTKGFSRDMRDIVLKAIEGDPVCRLALDVYYYRIAKYIGAYAAAMNGVDAIVFTAGVGENSPIMREEIIENYLGYLGIKIDKEANDFKGEEKIISTPDSKVIAMVVPTNEELMIAKDTKEIIEKGLDELKI

SEQ ID NO: 1123 - DNA, 1251 bp, synthetic construct
  misc_feature 1..1251: note = variant of acetate kinase from Marinitoga sp.38H-ov
  source 1..1251: mol_type = other DNA
atgcaccatcatcatcatcatggcggtagcggcatgaaagttctggtgattaattctggtagctcctccatcaaatatcagctcctcgatatgaccaacgaaaaggtattagcgaaaggcttggtcgagcgcattggcatcgacggttcgcgtatcgtgcataaagttaacggcgaagggcacgtgctggaacatgagattaaaaatcacgaaattggacttaaattggtcctggatcttcttacggacgaaaaatacggtgtgttgaaggatctcaaagaaatcgatgcagttgggcatcgcgtagtacatggcggcgagcgttttgccagtagcgtgaagattactgacgaagtcttaaagaccatcgagacgttgtcgttcttagctccgttacacaatccagcgaacattatgggtatcaagagcagcatgaaagtgttaccgggtgtgcctcaagttgccgtctttgatacagcgttccaccagaagatgccggagaaagcctatttgtacgcaatcccctatgagtactacgagaaatataaaattcgccgctatgggtttcatggaacctcacatcgttatgtgagtaaacgtgctgcggaaattatgggcaaaccgtacgatcagctcaagatcattaccgttcacgtgggtaacggcgcatcagttgcggcggtgaagaatggcgtatctgttgacacttccatgggtttcacaccacttgaaggtcttgtcatgggcacgcgcagcggcgatattgatccggccatcgtggaatttcttgttaaagaagaaggattgtcggccaaagaagtcgtcaacatcctcaacaagaaatctggtgtgtatgggctcaccaaaggctttagtagggacatgcgtgacattgtgctgaaggctattgaaggtgatcctgtatgccgccttgcattagatgtgtattattatcgtatcgcgaaatatattggcgcatacgctgcggccatgaacggtgttgacgcgatcgtctttaccgcaggagttggcgaaaatagcccgattatgcgcgaagaaattattgagaactacttgggctacttagggatcaagatcgataaagaagccaatgacttcaaaggtgaggagaagatcatttcaacgcccgattccaaagtgattgcgatggtagttccgaccaacgaggagctcatgatcgccaaagacacgaaagaaatcattgagaaagggttggacgagcttaagatc

SEQ ID NO: 1124 - protein, 417 aa, synthetic construct
  REGION 1..417: note = variant of acetate kinase from Marinitoga sp.38H-ov
MHHHHHHGGSGMKVLVINSGSSSIKYQLLDMTNEKVLAKGLVERIGIDGSRIVHKVNGEGHVLEHEIKNHEIGLKLVLDLLTDEKYGVLKDLKEIDAVGHRVVHGGERFASSVKITDEVLKTIETLSFLAPLHNPANIMGIKSSMKVLPGVPQVAVFDTAFHQKMPEKAYLYAIPYEYYEKYKIRRYGFHGTSHRYVSKRAAEIMGKPYDQLKIITVHVGNGASVAAVKNGVSVDTSMGFTPLEGLVMGTRSGDIDPAIVEFLVKEEGLSAKEVVNILNKKSGVYGLTKGFSRDMRDIVLKAIEGDPVCRLALDVYYYRIAKYIGAYAAAMNGVDAIVFTAGVGENSPIMREEIIENYLGYLGIKIDKEANDFKGEEKIISTPDSKVIAMVVPTNEELMIAKDTKEIIEKGLDELKI

SEQ ID NO: 1125 - DNA, 1251 bp, synthetic construct
  misc_feature 1..1251: note = variant of acetate kinase from Marinitoga sp.38H-ov
  source 1..1251: mol_type = other DNA
atgcaccatcatcatcatcatggcggtagcggcatgaaagttctggtgattaattctggtagctcctccatcaaatatcagctcctcgatatgaccaacgaaaaggtattagcgaaaggcttggtcgagcgcattggcatcgacggttcgcgtatcgtgcataaagttaacggcgaagggcacgtgctggaacatgagattaaaaatcacgaaattggacttaaattggtcctggatcttcttacggacgaaaaatacggtgtgttgaaggatctcaaagaaatcgatgcagttgggcatcgcgtagtacatggcggcgagcgttttgccagtagcatgaagattactgacgaagtcttaaagaccatcgagacgttgtcgttcttagctccgttacacaatccagcgaacattatgggtatcaagagcagcatgaaagtgttaccgggtgtgcctcaagttgccgtctttgatacagcgttccaccagaagatgccggagaaagcctatttgtacgcaatcccctatgagtactacgagaaatataaaattcgccgctatgggtttcatggaacctcacatcgttatgtgagtaaacgtgctgcggaaattatgggcaaaccgtacgatcagctcaagatcattaccgttcacgtgggtaacggcgcatcagttgcggcggtgagtaatggcgtatctgttgacacttccatgggtttcacaccacttgaaggtcttgtcatgggcacgcgcagcggcgatattgatccggccatcgtggaatttcttgagaaagaagaaggattgtcggccaaagaagtcgtcaacatcctcaacaagaaatctggtgtgtatgggctcaccaaaggctttagtagggacatgcgtgacattgtgctgaaggctattgaaggtgatcctgtatgccgccttgcattagatgtgtattattatcgtatcgcgaaatatattggcgcatacgctgcggccatgaacggtgttgacgcgatcgtctttaccgcaggagttggcgaaaatagcccgattatgcgcgaagaaattattgagaactacttgggctacttagggatcaagatcgataaagaagccaatgacttcaaaggtgaggagaagatcatttcaacgcccgattccaaagtgattgcgatggtagttccgaccaacgaggagctcatgatcgccaaagacacgaaagaaatcattgagaaagggttggacgagcttaagatc

SEQ ID NO: 1126 - protein, 417 aa, synthetic construct
  REGION 1..417: note = variant of acetate kinase from Marinitoga sp.38H-ov
MHHHHHHGGSGMKVLVINSGSSSIKYQLLDMTNEKVLAKGLVERIGIDGSRIVHKVNGEGHVLEHEIKNHEIGLKLVLDLLTDEKYGVLKDLKEIDAVGHRVVHGGERFASSMKITDEVLKTIETLSFLAPLHNPANIMGIKSSMKVLPGVPQVAVFDTAFHQKMPEKAYLYAIPYEYYEKYKIRRYGFHGTSHRYVSKRAAEIMGKPYDQLKIITVHVGNGASVAAVSNGVSVDTSMGFTPLEGLVMGTRSGDIDPAIVEFLEKEEGLSAKEVVNILNKKSGVYGLTKGFSRDMRDIVLKAIEGDPVCRLALDVYYYRIAKYIGAYAAAMNGVDAIVFTAGVGENSPIMREEIIENYLGYLGIKIDKEANDFKGEEKIISTPDSKVIAMVVPTNEELMIAKDTKEIIEKGLDELKI

SEQ ID NO: 1127 - DNA, 1251 bp, synthetic construct
  misc_feature 1..1251: note = variant of acetate kinase from Marinitoga sp.38H-ov
  source 1..1251: mol_type = other DNA
atgcaccatcatcatcatcatggcggtagcggcatgaaagttctggtgattaattctggtagctcctccatcaaatatcagctcctctctatgaccaacgaaaaggtattagcgaaaggcttggtcgagcgcattggcatcgacggttcgcgtatcgtgcataaagttaacggcgaagggcacgtgctggaacatgagattaaaaatcacgaaattggacttaaattggtcctggatcttcttacggacgaaaaatacggtgtgttgaaggatctcaaagaaatcgatgcagttgggcatcgcgtagtacatggcggcgagcgttttgccagtagcgtgaagattactgacgaagtcttaaagaccatcgagacgttgtcgttcttagctccgttacacaatccagcgaacattatgggtatcaagagcagcatgaaagtgttaccgggtgtgcctcaagttgccgtctttgatacagcgttccaccagaagatgccggagaaagcctatttgtacgcaatcccctatgagtactacgagaaatataaaattcgccgctatgggtttcatggaacctcacatcgttatgtgagtaaacgtgctgcggaaattatgggcaaaccgtacgatcagctcaagatcattaccgttcacgtgggtaacggcgcatcagttgcggcggtgaagaatggcgtatctgttgacacttccatgggtttcacaccacttgaaggtcttgtcatgggcacgcgcagcggcgatattgatccggccatcgtggaatttcttgagaaagaagaaggattgtcggccaaagaagtcgtcaacatcctcaacaagaaatctggtgtgtatgggctcaccaaaggctttagtagggacatgcgtgacattgtgctgaaggctattgaaggtgatcctgtatgccgccttgcattagatgtgtattattatcgtatcgcgaaatatattggcgcatacgctgcggccatgaacggtgttgacgcgatcgtctttaccgcaggagttggcgaaaatagcccgattatgcgcgaagaaattattgagaactacttgggctacttagggatcaagatcgataaagaagccaatgacttcaaaggtgaggagaagatcatttcaacgcccgattccaaagtgattgcgatggtagttccgaccaacgaggagctcatgatcgccaaagacacgaaagaaatcattgagaaagggttggacgagcttaagatc

SEQ ID NO: 1128 - protein, 417 aa, synthetic construct
  REGION 1..417: note = variant of acetate kinase from Marinitoga sp.38H-ov
MHHHHHHGGSGMKVLVINSGSSSIKYQLLSMTNEKVLAKGLVERIGIDGSRIVHKVNGEGHVLEHEIKNHEIGLKLVLDLLTDEKYGVLKDLKEIDAVGHRVVHGGERFASSVKITDEVLKTIETLSFLAPLHNPANIMGIKSSMKVLPGVPQVAVFDTAFHQKMPEKAYLYAIPYEYYEKYKIRRYGFHGTSHRYVSKRAAEIMGKPYDQLKIITVHVGNGASVAAVKNGVSVDTSMGFTPLEGLVMGTRSGDIDPAIVEFLEKEEGLSAKEVVNILNKKSGVYGLTKGFSRDMRDIVLKAIEGDPVCRLALDVYYYRIAKYIGAYAAAMNGVDAIVFTAGVGENSPIMREEIIENYLGYLGIKIDKEANDFKGEEKIISTPDSKVIAMVVPTNEELMIAKDTKEIIEKGLDELKI

SEQ ID NO: 1129 - DNA, 1251 bp, synthetic construct
  misc_feature 1..1251: note = variant of acetate kinase from Marinitoga sp.38H-ov
  source 1..1251: mol_type = other DNA
atgcaccatcatcatcatcatggcggtagcggcatgaaagttctggtgattaattctggtagctcctccatcaaatatcagctcctcgatatgaccaacgaaaaggtattagcgaaaggcttggtcgagcgcattggcatcgacggttcgcgtatcgtgcataaagttaacggcgaagggcacgtgctggaacatgagattaaaaatcacgaaattggacttaaattggtcctggatcttcttacggacgaaaaatacggtgtgttgaaggatctcaaagaaatcgatgcagttgggcatcgcgtagtacatggcggcgagcgttttgccagtagcgtgaagattactgacgaagtcttaaagaccatcgagacgttgtcgttcttagctccgttacacaatccagcgaacattatgggtatcaagagcagcatgaaagtgttaccgggtgtgcctcaagttgccgtctttgatacagcgttccaccagaagatgccggagaaagcctatttgtacgcaatcccctatgagtactacgagaaatataaaattcgccgctatgggtttcatggaacctcacatcgttatgtgagtaaacgtgctgcggaaattatgggcaaaccgtacgatcagctcaagatcattaccgttcacgtgggtaacggcgcatcagttgcggcggtgaagaatggcgtatctgttgacacttccatgggtttcacaccacttgaaggtcttgtcatgggcacgcgcagcggcgatattgatccggccatcgtgcgttttcttgagaaagaagaaggattgtcggccaaagaagtcgtcaacatcctcaacaagaaatctggtgtgtatgggctcaccaaaggctttagtagggacatgcgtgacattgtgctgaaggctattgaaggtgatcctgtatgccgccttgcattagatgtgtattattatcgtatcgcgaaatatattggcgcatacgctgcggccatgaacggtgttgacgcgatcgtctttaccgcaggagttggcgaaaatagcccgattatgcgcgaagaaattattgagaactacttgggctacttagggatcaagatcgataaagaagccaatgacttcaaaggtgaggagaagatcatttcaacgcccgattccaaagtgattgcgatggtagttccgaccaacgaggagctcatgatcgccaaagacacgaaagaaatcattgagaaagggttggacgagcttaagatc

SEQ ID NO: 1130 - protein, 417 aa, synthetic construct
  REGION 1..417: note = variant of acetate kinase from Marinitoga sp.38H-ov
MHHHHHHGGSGMKVLVINSGSSSIKYQLLDMTNEKVLAKGLVERIGIDGSRIVHKVNGEGHVLEHEIKNHEIGLKLVLDLLTDEKYGVLKDLKEIDAVGHRVVHGGERFASSVKITDEVLKTIETLSFLAPLHNPANIMGIKSSMKVLPGVPQVAVFDTAFHQKMPEKAYLYAIPYEYYEKYKIRRYGFHGTSHRYVSKRAAEIMGKPYDQLKIITVHVGNGASVAAVKNGVSVDTSMGFTPLEGLVMGTRSGDIDPAIVRFLEKEEGLSAKEVVNILNKKSGVYGLTKGFSRDMRDIVLKAIEGDPVCRLALDVYYYRIAKYIGAYAAAMNGVDAIVFTAGVGENSPIMREEIIENYLGYLGIKIDKEANDFKGEEKIISTPDSKVIAMVVPTNEELMIAKDTKEIIEKGLDELKI

SEQ ID NO: 1131 - DNA, 1251 bp, synthetic construct
  misc_feature 1..1251: note = variant of acetate kinase from Marinitoga sp.38H-ov
  source 1..1251: mol_type = other DNA
atgcaccatcatcatcatcatggcggtagcggcatgaaagttctggtgattaattctggtagctcctccatcaaatatcagctcctcgatatgaccaacgaaaaggtattagcgaaaggcttggtcgagcgcattggcatcgacggttcgcgtatcgtgcataaagttaacggcgaagggcacgtgctggaacatgagattaaaaatcacgaaattggacttaaattggtcctggatcttcttacggacgaaaaatacggtgtgttgaaggatctcaaagaaatcgatgcagttgggcatcgcgtagtacatggcggcgagcgttttgccagtagcgtgaagattactgacgaagtcttaaagaccatcgagacgttgtcgttcttagctccgttacacaatccagcgaacattatgggtatcaagagcagcatgaaagtgttaccgggtgtgcctcaagttgccgtctttgatacagcgttccaccagaagatgccggagaaagcctatttgtacgcaatcccctatgagtactacgagaaatataaaattcgccgctatgggtttcatggaacctcacatcgttatgtgagtaaacgtgctgcggaaattatgggcaaaccgtacgatcagctcaagatcattaccgttcacgtgggtaacggcgcatcagttgcggcggtgaagaatggcgtatctgttgacacttccatgggtttcacaccacttgaaggtcttgtcatgggcacgcgcagcggcgatattgatccggccatcgtggaatttcttgagaaagaagaaggattgtcggccaaagaagtcgtcaacatcctcaacaagaaatctggtgtgtatgggctcaccaaaggctttagtagggacatgcgtgacattgtgctgaaggctattgaaggtgatcctgtatgccgccttgcattagatgtgtattattatcgtatcgcgaaatatattggcgcatacgctgcggccatgaacggtgttgacgcgatcgtctttaccgcaggagttggcgaaaatagcccgattatgcgcgaagaaattattgagaactacttgggctacttagggatcaagatcgataaagaagccaatgacttcaaaggtgaggagaagatcatttcaacgcccgattccaaagtgattgcgatggtagttccgaccaacgaggagtatatgatcgccaaagacacgaaagaaatcattgagaaagggttggacgagcttaagatc

SEQ ID NO: 1132 - protein, 417 aa, synthetic construct
  REGION 1..417: note = variant of acetate kinase from Marinitoga sp.38H-ov
MHHHHHHGGSGMKVLVINSGSSSIKYQLLDMTNEKVLAKGLVERIGIDGSRIVHKVNGEGHVLEHEIKNHEIGLKLVLDLLTDEKYGVLKDLKEIDAVGHRVVHGGERFASSVKITDEVLKTIETLSFLAPLHNPANIMGIKSSMKVLPGVPQVAVFDTAFHQKMPEKAYLYAIPYEYYEKYKIRRYGFHGTSHRYVSKRAAEIMGKPYDQLKIITVHVGNGASVAAVKNGVSVDTSMGFTPLEGLVMGTRSGDIDPAIVEFLEKEEGLSAKEVVNILNKKSGVYGLTKGFSRDMRDIVLKAIEGDPVCRLALDVYYYRIAKYIGAYAAAMNGVDAIVFTAGVGENSPIMREEIIENYLGYLGIKIDKEANDFKGEEKIISTPDSKVIAMVVPTNEEYMIAKDTKEIIEKGLDELKI

SEQ ID NO: 1133 - DNA, 1251 bp, synthetic construct
  misc_feature 1..1251: note = variant of acetate kinase from Marinitoga sp.38H-ov
  source 1..1251: mol_type = other DNA
atgcaccatcatcatcatcatggcggtagcggcatgaaagttctggtgattaattctggtagctcctccatcaaatatcagctcctcgatatgaccaacgaaaaggtattagcgaaaggcttggtcgagcgcattggcatcgacggttcgcgtatcgtgcataaagttaacggcgaagggcacgtgctggaacatgagattaaaaatcacgaaattggacttaaattggtcctggatcttcttacggacgaaaaatacggtgtgttgaaggatctcaaagaaatcgatgcagttgggcatcgcgtagtacatggcggcgagcgttttgccagtagcgtgaagattactgacgaagtcttaaagaccatcgagacgttgtcgttcttagctccgttacacaatccagcgaacattatgggtatcaagagcagcatgaaagtgttaccgggtgtgcctcaagttgccgtctttgatacagcgttccaccagaagatgccggagaaagcctatttgtacgcaatcccctatgagtactacgagaaatataaaattcgccgctatgggtttcatggaacctcacatcgttatgtgagtaaacgtgctgcggaaattatgggcaaaccgtacgatcagctcaagatcattaccgttcacgtgggtaacggcgcatcagttgcggcggtgaagaatggcgtatctgttgacacttccatgggtttcacaccacttgaaggtcttgtcatgggcacgcgcagcggcgatattgatccggccatcgtggaatttcttgagaaagaagaaggattgtcggccaaagaagtcgtcaacatcctcaacaagaaatctggtgtgtatgggctcaccaaaggctttagtagggacatgcgtgacattgtgctgaaggctattgaaggtgatcctgtatgccgccttgcattagatgtgtattattatcgtatcgcgaaatatattggcgcatacgctgcggccatgaacggtgttgacgcgatcgtctttaccgcaggagttggcgaaaatagcccgattatgcgcgaagaaattattgagaactacttgggctacttagggatcaagatcgataaagaagccaatgacttcaaaggtgaggagaagatcatttcaacgcccgattccaaagtgattgcgatggtagttccgaccaacgaggagctcatgatcgccaaagacacggatgaaatcattgagaaagggttggacgagcttaagatc

SEQ ID NO: 1134 - protein, 417 aa, synthetic construct
  REGION 1..417: note = variant of acetate kinase from Marinitoga sp.38H-ov
MHHHHHHGGSGMKVLVINSGSSSIKYQLLDMTNEKVLAKGLVERIGIDGSRIVHKVNGEGHVLEHEIKNHEIGLKLVLDLLTDEKYGVLKDLKEIDAVGHRVVHGGERFASSVKITDEVLKTIETLSFLAPLHNPANIMGIKSSMKVLPGVPQVAVFDTAFHQKMPEKAYLYAIPYEYYEKYKIRRYGFHGTSHRYVSKRAAEIMGKPYDQLKIITVHVGNGASVAAVKNGVSVDTSMGFTPLEGLVMGTRSGDIDPAIVEFLEKEEGLSAKEVVNILNKKSGVYGLTKGFSRDMRDIVLKAIEGDPVCRLALDVYYYRIAKYIGAYAAAMNGVDAIVFTAGVGENSPIMREEIIENYLGYLGIKIDKEANDFKGEEKIISTPDSKVIAMVVPTNEELMIAKDTDEIIEKGLDELKI

SEQ ID NO: 1135 - DNA, 1251 bp, synthetic construct
  misc_feature 1..1251: note = variant of acetate kinase from Marinitoga sp.38H-ov
  source 1..1251: mol_type = other DNA
atgcaccatcatcatcatcatggcggtagcggcatgaaagttctggtgattaattctggtagctcctccatcaaatatcagctcctcgatatgaccaacgaaaaggtattagcgaaaggcttggtcgagcgcattggcatcgacggttcgcgtatcgtgcataaagttaacggcgaagggcacgtgctggaacatgagattaaaaatcacgaaattggacttaaattggtcctggatcttcttacggacgaaaaatacggtgtgttgaaggatctcaaagaaatcgatgcagttgggcatcgcgtagtacatggcggcgagcgttttgccagtagcgtgaagattactgacgaagtcttaaagaccatcgagacgttgtcgttcttagctccgttacacaatccagcgaacattatgggtatcaagagcagcatgaaagtgttaccgggtgtgcctcaagttgccgtctttgatacagcgttccaccagaagatgccggagaaagcctatttgtacgcaatcccctatgagtactacgagaaatataaaattcgccgctatgggtttcatggaacctcacatcgttatgtgagtaaacgtgctgcggaaattatgggcaaaccgtacgatcagctcaagatcattaccgttcacgtgggtaacggcgcatcagttgcggcggtgaagaatggcgtatctgttgacacttccatgggtttcacaccacttgaaggtcttgtcatgggcacgcgcagcggcgatattgatccggccatcgtggaatttcttgagaaagaagaaggattgtcggccaaagaagtcgtcaacatcctcaacaagaaatctggtgtgtatgggctcaccaaaggctttagtagggacatgcgtgacattgtgctgaaggctattgaaggtgatcctgtatgccgccttgcattagatgtgtattattatcgtatcgcgaaatatattggcgcatacgctgcggccatgaacggtgttgacgcgatcgtctttaccgcaggagttggcgaaaatagcccgattatgcgcgaagaaattattgagaactacttgggctacttagctatcaagatcgataaagaagccaatgacttcaaaggtgaggagaagatcatttcaacgcccgattccaaagtgattgcgatggtagttccgaccaacgaggagctcatgatcgccaaagacacgaaagaaatcattgagaaagggttggacgagcttaagatc

SEQ ID NO: 1136 - protein, 417 aa, synthetic construct
  REGION 1..417: note = variant of acetate kinase from Marinitoga sp.38H-ov
MHHHHHHGGSGMKVLVINSGSSSIKYQLLDMTNEKVLAKGLVERIGIDGSRIVHKVNGEGHVLEHEIKNHEIGLKLVLDLLTDEKYGVLKDLKEIDAVGHRVVHGGERFASSVKITDEVLKTIETLSFLAPLHNPANIMGIKSSMKVLPGVPQVAVFDTAFHQKMPEKAYLYAIPYEYYEKYKIRRYGFHGTSHRYVSKRAAEIMGKPYDQLKIITVHVGNGASVAAVKNGVSVDTSMGFTPLEGLVMGTRSGDIDPAIVEFLEKEEGLSAKEVVNILNKKSGVYGLTKGFSRDMRDIVLKAIEGDPVCRLALDVYYYRIAKYIGAYAAAMNGVDAIVFTAGVGENSPIMREEIIENYLGYLAIKIDKEANDFKGEEKIISTPDSKVIAMVVPTNEELMIAKDTKEIIEKGLDELKI

SEQ ID NO: 1137 - DNA, 1251 bp, synthetic construct
  misc_feature 1..1251: note = variant of acetate kinase from Marinitoga sp.38H-ov
  source 1..1251: mol_type = other DNA
atgcaccatcatcatcatcatggcggtagcggcatgaaagttctggtgattaattctggtagctcctccatcaaatatcagctcctcgatatgaccaacgaaaaggtattagcgaaaggcttggtcgagcgcattggcatcgacggttcgcgtatcgtgcataaagttaacggcgaagggcacgtgctggaacatgagattaaaaatcacgaaattggacttaaattggtcctggatcttcttacggacgaaaaatacggtgtgttgaaggatctcaaagaaatcgatgcagttgggcatcgcgtagtacatggcggcgagcgttttgccagtagcgtgaagattactgacgaagtcttaaagaccatcgagacgttgtcgttcttagctccgttacacaatccagcgaacattatgggtatcaagagcagcatgaaagtgttaccgggtgtgcctcaagttgccgtctttgatacagcgttccaccagaagatgccggagaaagcctatttgtacgcaatcccctatgagtactacgagaaatataaaattcgccgctatgggtttcatggaacctcacatcgttatgtgagtaaacgtgctgcggaaattatgggcaaaccgtacgatcagctcaagatcattaccgttcacgtgggtaacggcgcatcagttgcggcggtgaagaatggcgtatctgttgacacttccatgggtttcacaccacttgaaggtcttgtcatgggcacgcgcagcggcgatattgatccggccatcgtggaatttcttgagaaagaagaaggattgtcggccaaagaagtcgtcaacatcctcaacaagaaatctggtgtgtatgggctcaccaaaggctttagtagggacatgcgtgacattgtgctgaaggctattgaaggtgatcctgtatgccgccttgcattagatgtgtattattatcgtatcgcgaaatatctgggcgcatacgctgcggccatgaacggtgttgacgcgatcgtctttaccgcaggagttggcgaaaatagcccgattatgcgcgaagaaattattgagaactacttgggctacttagggatcaagatcgataaagaagccaatgacttcaaaggtgaggagaagatcatttcaacgcccgattccaaagtgattgcgatggtagttccgaccaacgaggagctcatgatcgccaaagacacgaaagaaatcattgagaaagggttggacgagcttaagatc

SEQ ID NO: 1138 - protein, 417 aa, synthetic construct
  REGION 1..417: note = variant of acetate kinase from Marinitoga sp.38H-ov
MHHHHHHGGSGMKVLVINSGSSSIKYQLLDMTNEKVLAKGLVERIGIDGSRIVHKVNGEGHVLEHEIKNHEIGLKLVLDLLTDEKYGVLKDLKEIDAVGHRVVHGGERFASSVKITDEVLKTIETLSFLAPLHNPANIMGIKSSMKVLPGVPQVAVFDTAFHQKMPEKAYLYAIPYEYYEKYKIRRYGFHGTSHRYVSKRAAEIMGKPYDQLKIITVHVGNGASVAAVKNGVSVDTSMGFTPLEGLVMGTRSGDIDPAIVEFLEKEEGLSAKEVVNILNKKSGVYGLTKGFSRDMRDIVLKAIEGDPVCRLALDVYYYRIAKYLGAYAAAMNGVDAIVFTAGVGENSPIMREEIIENYLGYLGIKIDKEANDFKGEEKIISTPDSKVIAMVVPTNEELMIAKDTKEIIEKGLDELKI

SEQ ID NO: 1139 - DNA, 1251 bp, synthetic construct
  misc_feature 1..1251: note = variant of acetate kinase from Marinitoga sp.38H-ov
  source 1..1251: mol_type = other DNA
atgcaccatcatcatcatcatggcggtagcggcatgaaagttctggtgattaattctggtagctcctccatcaaatatcagctcctcgatatgaccaacgaaaaggtattagcgaaaggcttggtcgagcgcattggcatcgacggttcgcgtatcgtgcataaagttaacggcgaagggcacgtgctggaacatgagattaaaaatcacgaaattggacttaaattggtcctggatcttcttacggacgaaaaatacggtgtgttgaaggatctcaaagaaatcgatgcagttgggcatcgcgtagtacatggcggcgagcgttttgccagtagcgtgaagattactgacgaagtcttaaagaccatcgagacgttgtcgttcttagctccgttacacaatccagcgaacattatgggtatcaagagcagcatgaaagtgttaccgggtgtgcctcaagttgccgtctttgatacagcgttccaccagaagatgccggagaaagcctatttgtacgcaatcccctatgagtactacgagaaatataaaattcgccgctatgggtttcatggaacctcacatcgttatgtgagtaaacgtgctgcggaacctatgggcaaaccgtacgatcagctcaagatcattaccgttcacgtgggtaacggcgcatcagttgcggcggtgaagaatggcgtatctgttgacacttccatgggtttcacaccacttgaaggtcttgtcatgggcacgcgcagcggcgatattgatccggccatcgtggaatttcttgagaaagaagaaggattgtcggccaaagaagtcgtcaacatcctcaacaagaaatctggtgtgtatgggctcaccaaaggctttagtagggacatgcgtgacattgtgctgaaggctattgaaggtgatcctgtatgccgccttgcattagatgtgtattattatcgtatcgcgaaatatattggcgcatacgctgcggccatgaacggtgttgacgcgatcgtctttaccgcaggagttggcgaaaatagcccgattatgcgcgaagaaattattgagaactacttgggctacttagggatcaagatcgataaagaagccaatgacttcaaaggtgaggagaagatcatttcaacgcccgattccaaagtgattgcgatggtagttccgaccaacgaggagctcatgatcgccaaagacacgaaagaaatcattgagaaagggttggacgagcttaagatc

SEQ ID NO: 1140 - protein, 417 aa, synthetic construct
  REGION 1..417: note = variant of acetate kinase from Marinitoga sp.38H-ov
MHHHHHHGGSGMKVLVINSGSSSIKYQLLDMTNEKVLAKGLVERIGIDGSRIVHKVNGEGHVLEHEIKNHEIGLKLVLDLLTDEKYGVLKDLKEIDAVGHRVVHGGERFASSVKITDEVLKTIETLSFLAPLHNPANIMGIKSSMKVLPGVPQVAVFDTAFHQKMPEKAYLYAIPYEYYEKYKIRRYGFHGTSHRYVSKRAAEPMGKPYDQLKIITVHVGNGASVAAVKNGVSVDTSMGFTPLEGLVMGTRSGDIDPAIVEFLEKEEGLSAKEVVNILNKKSGVYGLTKGFSRDMRDIVLKAIEGDPVCRLALDVYYYRIAKYIGAYAAAMNGVDAIVFTAGVGENSPIMREEIIENYLGYLGIKIDKEANDFKGEEKIISTPDSKVIAMVVPTNEELMIAKDTKEIIEKGLDELKI

SEQ ID NO: 1141 - DNA, 1251 bp, synthetic construct
  misc_feature 1..1251: note = variant of acetate kinase from Marinitoga sp.38H-ov
  source 1..1251: mol_type = other DNA
atgcaccatcatcatcatcatggcggtagcggcatgaaagttctggtgattaattctggtagctcctccatcaaatatcagctcctcgatatgaccaacgaaaaggtattagcgaaaggcttggtcgagcgcattggcatcgacggttcgcgtatcgtgcataaagttaacggcgaagggcacgtgctggaacatgagattaaaaatcacgaaattggacttaaattggtcctggatcttcttacggacgaaaaatacggtgtgttgaaggatctcaaagaaatcgatgcagttgggcatcgcgtagtacatggcggcgagcgttttgccagtagcgtgaagattactgacgaagtcttaaagaccatcgagacgttgtcgttcttagctccgttacacaatccagcgaacattatgggtatcaagagcagcatgaaagtgttaccgggtgtgcctcaagttgccgtctttgatacagcgttccaccagaagatgccggagaaagcctatttgtacgcaatcccctatgagtactacgagaaatataaaattcgccgctatgggtttcatggaacctcacatcgttatgtgagtaaacgtgctgcggaaattatgggcaaaccgtacgatcagctcaagatcattaccgttcacgtgggtaacggcgcatcagttgcggcggtgaagaatggcgtatctgttgacacttccatgggtttcacaccacttgaaggtcttgtcatgggcacgcgcagcggcgatattgatccggccatcgtggaatttcttgagaaagaagaaggattgtcggccaaagaagtcgtcaacatcctcaacaagaaatctggtgtgtatgggctcaccaaaggctttagtagggacatgcgtgacattgtgctgaaggctattgaaggtgatcctgtatgccgccttgcattagatgtgtattattatcgtatcgcgaaatatattggcgcatacgctgcggccatgaacggtgttgacgcgatcgtctttaccgcaggagttggcgaaaatagcccgattatgcgcgaagaaattattgagaactacttgggctacttagggatcaagatcgataaagaaatgaatgacttcaaaggtgaggagaagatcatttcaacgcccgattccaaagtgattgcgatggtagttccgaccaacgaggagctcatgatcgccaaagacacgaaagaaatcattgagaaagggttggacgagcttaagatc

SEQ ID NO: 1142 - protein, 417 aa, synthetic construct
  REGION 1..417: note = variant of acetate kinase from Marinitoga sp.38H-ov
MHHHHHHGGSGMKVLVINSGSSSIKYQLLDMTNEKVLAKGLVERIGIDGSRIVHKVNGEGHVLEHEIKNHEIGLKLVLDLLTDEKYGVLKDLKEIDAVGHRVVHGGERFASSVKITDEVLKTIETLSFLAPLHNPANIMGIKSSMKVLPGVPQVAVFDTAFHQKMPEKAYLYAIPYEYYEKYKIRRYGFHGTSHRYVSKRAAEIMGKPYDQLKIITVHVGNGASVAAVKNGVSVDTSMGFTPLEGLVMGTRSGDIDPAIVEFLEKEEGLSAKEVVNILNKKSGVYGLTKGFSRDMRDIVLKAIEGDPVCRLALDVYYYRIAKYIGAYAAAMNGVDAIVFTAGVGENSPIMREEIIENYLGYLGIKIDKEMNDFKGEEKIISTPDSKVIAMVVPTNEELMIAKDTKEIIEKGLDELKI

SEQ ID NO: 1143 - DNA, 1251 bp, synthetic construct
  misc_feature 1..1251: note = variant of acetate kinase from Marinitoga sp.38H-ov
  source 1..1251: mol_type = other DNA
atgcaccatcatcatcatcatggcggtagcggcatgaaagttctggtgattaattctggtagctcctccatcaaatatcagctcctcgatatgaccaacgaaaaggtattagcgaaaggcttggtcgagcgcattggcatcgacggttcgcgtatcgtgcataaagttaacggcgaagggcacgtgctggaacatgagattaaaaatcacgaaattggacttaaattggtcctggatcttcttacggacgaaaaatacggtgtgttgaaggatctcaaagaaatcgatgcagttgggcatcgcgtagtacatggcggcgagcgttttgccagtagcgtgaagattactgacgaagtcttaaagaccatcgagacgttgtcgttcttagctccgttacacaatccagcgaacattatgggtatcaagagcagcatgaaagtgttaccgggtgtgcctcaagttgccgtctttgatacagcgttccaccagaagatgccggagaaagcctatttgtacgcaatcccctatgagtactacgagaaatataaaattcgccgctatgggtttcatggaacctcacatcgttatgtgagtaaacgtgctgcggaaattatgggcaaaccgtacgatcagctcaagatcattaccgttcacgtgggtaacggcgcatcagttgcggcggtgaagaatggcgtatctgttgacacttccatgggtttcacaccacttgaaggtcttgtcatgggcacgcgcagcggcgatattgatccggccatcgtggaatttcttgagaaagaagaaggattgtcggccaaagaagtcgtcaacatcctcaacaagaaatctggtgtgtatgggctcaccaaaggctttagtagggacatgcgtgacattgtgctgaaggctattgaaggtgatcctgtatgccgccttgcattagatgtgtattattatcgtatcgcgaaatatattggcgcatacgctgcggccatgaacggtgttgacgcgatcgtctttaccgcaggagttggcgaaaatagcccgattatgcgcgaagaaattattgagaactacttgggctacttagggatcaagatcgataaagaagccaatgacttcaaaggtgaggagaagatcatttcaacgcccgattccaaagtgattgcgatggtagttccgaccaacgaggagctcatgatcgccaaagacacgaaagaaatcattgcgaaagggttggacgagcttaagatc

SEQ ID NO: 1144 - protein, 417 aa, synthetic construct
  REGION 1..417: note = variant of acetate kinase from Marinitoga sp.38H-ov
MHHHHHHGGSGMKVLVINSGSSSIKYQLLDMTNEKVLAKGLVERIGIDGSRIVHKVNGEGHVLEHEIKNHEIGLKLVLDLLTDEKYGVLKDLKEIDAVGHRVVHGGERFASSVKITDEVLKTIETLSFLAPLHNPANIMGIKSSMKVLPGVPQVAVFDTAFHQKMPEKAYLYAIPYEYYEKYKIRRYGFHGTSHRYVSKRAAEIMGKPYDQLKIITVHVGNGASVAAVKNGVSVDTSMGFTPLEGLVMGTRSGDIDPAIVEFLEKEEGLSAKEVVNILNKKSGVYGLTKGFSRDMRDIVLKAIEGDPVCRLALDVYYYRIAKYIGAYAAAMNGVDAIVFTAGVGENSPIMREEIIENYLGYLGIKIDKEANDFKGEEKIISTPDSKVIAMVVPTNEELMIAKDTKEIIAKGLDELKI

SEQ ID NO: 1145 - DNA, 1251 bp, synthetic construct
  misc_feature 1..1251: note = variant of acetate kinase from Marinitoga sp.38H-ov
  source 1..1251: mol_type = other DNA
atgcaccatcatcatcatcatggcggtagcggcatgaaagttctggtgattaattctggtagctcctccatcaaatatcagctcctcgatatgaccaacgaaaaggtattagcgaaaggcttggtcgagcgcattggcatcgacggttcgcgtatcgtgcataaagttaacggcgaagggcacgtgctggaacatgagattaaaaatcacgaaattggacttaaattggtcctggatcttcttacggacgaaaaatacggtgtgttgaaggatctcaaagaaatcgatgcagttgggcatcgcgtagtacatggcggcgagcgttttgccagtagcgtgaagattactgacgaagtcttaaagaccatcgagacgttgtcgttcttagctccgttacacaatccagcgaacattatgggtatcaagagcagcatgaaagtgttaccgggtgtgcctcaagttgccgtctttgatacagcgttccaccagaagatgccggagaaagcctatttgtacgcaatcccctatgagtactacgagaaatataaaattcgccgctatgggtttcatggaacctcacatcgttatgtgagtaaacgtgctgcggaaattatgggcaaaccgtacgatcagctctcgatcattaccgttcacgtgggtaacggcgcatcagttgcggcggtgaagaatggcgtatctgttgacacttccatgggtttcacaccacttgaaggtcttgtcatgggcacgcgcagcggcgatattgatccggccatcgtggaatttcttgagaaagaagaaggattgtcggccaaagaagtcgtcaacatcctcaacaagaaatctggtgtgtatgggctcaccaaaggctttagtagggacatgcgtgacattgtgctgaaggctattgaaggtgatcctgtatgccgccttgcattagatgtgtattattatcgtatcgcgaaatatattggcgcatacgctgcggccatgaacggtgttgacgcgatcgtctttaccgcaggagttggcgaaaatagcccgattatgcgcgaagaaattattgagaactacttgggctacttagggatcaagatcgataaagaagccaatgacttcaaaggtgaggagaagatcatttcaacgcccgattccaaagtgattgcgatggtagttccgaccaacgaggagctcatgatcgccaaagacacgaaagaaatcattgagaaagggttggacgagcttaagatc

SEQ ID NO: 1146 - protein, 417 aa, synthetic construct
  REGION 1..417: note = variant of acetate kinase from Marinitoga sp.38H-ov
MHHHHHHGGSGMKVLVINSGSSSIKYQLLDMTNEKVLAKGLVERIGIDGSRIVHKVNGEGHVLEHEIKNHEIGLKLVLDLLTDEKYGVLKDLKEIDAVGHRVVHGGERFASSVKITDEVLKTIETLSFLAPLHNPANIMGIKSSMKVLPGVPQVAVFDTAFHQKMPEKAYLYAIPYEYYEKYKIRRYGFHGTSHRYVSKRAAEIMGKPYDQLSIITVHVGNGASVAAVKNGVSVDTSMGFTPLEGLVMGTRSGDIDPAIVEFLEKEEGLSAKEVVNILNKKSGVYGLTKGFSRDMRDIVLKAIEGDPVCRLALDVYYYRIAKYIGAYAAAMNGVDAIVFTAGVGENSPIMREEIIENYLGYLGIKIDKEANDFKGEEKIISTPDSKVIAMVVPTNEELMIAKDTKEIIEKGLDELKI

SEQ ID NO: 1147 - DNA, 1251 bp, synthetic construct
  misc_feature 1..1251: note = variant of acetate kinase from Marinitoga sp.38H-ov
  source 1..1251: mol_type = other DNA
atgcaccatcatcatcatcatggcggtagcggcatgaaagttctggtgattaattctggtagctcctccatcaaatatcagctcctcgatatgaccaacgaaaaggtattagcgaaaggcttggtcgagcgcattggcatcgacggttcgcgtatcgtggttaaagttaacggcgaagggcacgtgctggaacatgagattaaaaatcacgaaattggacttaaattggtcctggatcttcttacggacgaaaaatacggtgtgttgaaggatctcaaagaaatcgatgcagttgggcatcgcgtagtacatggcggcgagcgttttgccagtagcgtgaagattactgacgaagtcttaaagaccatcgagacgttgtcgttcttagctccgttacacaatccagcgaacattatgggtatcaagagcagcatgaaagtgttaccgggtgtgcctcaagttgccgtctttgatacagcgttccaccagaagatgccggagaaagcctatttgtacgcaatcccctatgagtactacgagaaatataaaattcgccgctatgggtttcatggaacctcacatcgttatgtgagtaaacgtgctgcggaaattatgggcaaaccgtacgatcagctcaagatcattaccgttcacgtgggtaacggcgcatcagttgcggcggtgaagaatggcgtatctgttgacacttccatgggtttcacaccacttgaaggtcttgtcatgggcacgcgcagcggcgatattgatccggccatcgtggaatttcttgagaaagaagaaggattgtcggccaaagaagtcgtcaacatcctcaacaagaaatctggtgtgtatgggctcaccaaaggctttagtagggacatgcgtgacattgtgctgaaggctattgaaggtgatcctgtatgccgccttgcattagatgtgtattattatcgtatcgcgaaatatattggcgcatacgctgcggccatgaacggtgttgacgcgatcgtctttaccgcaggagttggcgaaaatagcccgattatgcgcgaagaaattattgagaactacttgggctacttagggatcaagatcgataaagaagccaatgacttcaaaggtgaggagaagatcatttcaacgcccgattccaaagtgattgcgatggtagttccgaccaacgaggagctcatgatcgccaaagacacgaaagaaatcattgagaaagggttggacgagcttaagatc

SEQ ID NO: 1148 - protein, 417 aa, synthetic construct
  REGION 1..417: note = variant of acetate kinase from Marinitoga sp.38H-ov
MHHHHHHGGSGMKVLVINSGSSSIKYQLLDMTNEKVLAKGLVERIGIDGSRIVVKVNGEGHVLEHEIKNHEIGLKLVLDLLTDEKYGVLKDLKEIDAVGHRVVHGGERFASSVKITDEVLKTIETLSFLAPLHNPANIMGIKSSMKVLPGVPQVAVFDTAFHQKMPEKAYLYAIPYEYYEKYKIRRYGFHGTSHRYVSKRAAEIMGKPYDQLKIITVHVGNGASVAAVKNGVSVDTSMGFTPLEGLVMGTRSGDIDPAIVEFLEKEEGLSAKEVVNILNKKSGVYGLTKGFSRDMRDIVLKAIEGDPVCRLALDVYYYRIAKYIGAYAAAMNGVDAIVFTAGVGENSPIMREEIIENYLGYLGIKIDKEANDFKGEEKIISTPDSKVIAMVVPTNEELMIAKDTKEIIEKGLDELKI

SEQ ID NO: 1149 - DNA, 1251 bp, synthetic construct
  misc_feature 1..1251: note = variant of acetate kinase from Marinitoga sp.38H-ov
  source 1..1251: mol_type = other DNA
atgcaccatcatcatcatcatggcggtagcggcatgaaagttctggtgattaattctggtagctcctccatcaaatatcagctcctcgatatgaccaacgaaaaggtattagcgaaaggcttggtcgagcgcattggcatcgacggttcgcgtatcgtgcataaagttaacggcgaagggcacgtgctggaacatgagattaaaaatcacgaaattggacttaaattggtcctggatcttcttacggacgaaaaatacggtgtgttgaaggatctcaaagaaatcgatgcagttgggcatcgcgtagtacatggcggcgagcgttttgccagtagcgtgaagattactgacgaagtcttaaagaccatcgagacgttgtcgttcttagctccgttacacaatccagcgaacattatgggtatcaagagcagcatgaaagtgttaccgggtgtgcctcaagttgccgtctttgatacagcgttccaccagaagatgccggagaaagcctatttgtacgcaatcccctatgagtactacgagaaatataaaattcgccgctatgggtttcatggaacctcacatcgttatgtgagtaaacgtgctgcggaaattatgggcaaaccgtacgatcagctcaagatcattaccgttcacgtgggtaacggcgcatcagttgcgtcggtgaagaatggcgtatctgttgacacttccatgggtttcacaccacttgaaggtcttgtcatgggcacgcgcagcggcgatattgatccggccatcgtggaatttcttgagaaagaagaaggattgtcggccaaagaagtcgtcaacatcctcaacaagaaatctggtgtgtatgggctcaccaaaggctttagtagggacatgcgtgacattgtgctgaaggctattgaaggtgatcctgtatgccgccttgcattagatgtgtattattatcgtatcgcgaaatatattggcgcatacgctgcggccatgaacggtgttgacgcgatcgtctttaccgcaggagttggcgaaaatagcccgattatgcgcgaagaaattattgagaactacttgggctacttagggatcaagatcgataaagaagccaatgacttcaaaggtgaggagaagatcatttcaacgcccgattccaaagtgattgcgatggtagttccgaccaacgaggagctcatgatcgccaaagacacgaaagaaatcattgagaaagggttggacgagcttaagatc

SEQ ID NO: 1150 - protein, 417 aa, synthetic construct
  REGION 1..417: note = variant of acetate kinase from Marinitoga sp.38H-ov
MHHHHHHGGSGMKVLVINSGSSSIKYQLLDMTNEKVLAKGLVERIGIDGSRIVHKVNGEGHVLEHEIKNHEIGLKLVLDLLTDEKYGVLKDLKEIDAVGHRVVHGGERFASSVKITDEVLKTIETLSFLAPLHNPANIMGIKSSMKVLPGVPQVAVFDTAFHQKMPEKAYLYAIPYEYYEKYKIRRYGFHGTSHRYVSKRAAEIMGKPYDQLKIITVHVGNGASVASVKNGVSVDTSMGFTPLEGLVMGTRSGDIDPAIVEFLEKEEGLSAKEVVNILNKKSGVYGLTKGFSRDMRDIVLKAIEGDPVCRLALDVYYYRIAKYIGAYAAAMNGVDAIVFTAGVGENSPIMREEIIENYLGYLGIKIDKEANDFKGEEKIISTPDSKVIAMVVPTNEELMIAKDTKEIIEKGLDELKI

SEQ ID NO: 1151 - DNA, 1251 bp, synthetic construct
  misc_feature 1..1251: note = variant of acetate kinase from Marinitoga sp.38H-ov
  source 1..1251: mol_type = other DNA
atgcaccatcatcatcatcatggcggtagcggcatgaaagttctggtgattaattctggtagctcctccatcaaatatcagctcctcgatatgaccaacgaaaaggtattagcgaaaggcttggtcgagcgcattggcatcgacggttcgcgtatcgtgcataaagttaacggcgaagggcacgtgctggaacatgagattaaaaatcacgaaattggacttaaattggtcctggatcttcttacggacgaaaaatacggtgtgttgaaggatctcaaagaaatcgatgcagttgggcatcgcgtagtacatggcggcgagcgttttgccagtagcgtgaagattactgacgaagtcttaaagaccatcgagacgttgtcgttcttagctccgttacacaatccagcgaacattatgggtatcaagagcagcatgaaagtgttaccgggtgtgcctcaagttgccgtctttgatacagcgttccaccagaagatgccggagaaagcctatttgtacgcaatcccctatgagtactacgagaaatataaaattcgccgctatgggtttcatggaacctcacatcgttatgtgagtaaacgtgctgcggaaattatgggcaaaccgtacgatcagctcaagatcattaccgttcacgtgggtaacggcgcatcagttgcggcggtgaagaatggcgtatctgttgacacttccatgggtttcacaccacttgaaggtcttgtcatgggcacgcgcagcggcgatattgatccggccatcgtggaatttcttgagaaagaagaaggattgtcggccaaagaagtcgtcaacatcctcaacaagaaatctggtgtgtatgggctcaccaaaggctttagtagggacatgcgtgacattgtgctgaaggctattgaaggtgatcctgtatgccgccttgcattagatgtgtattattatcgtatcgcgaaatatattggcgcatacgctgcggccatgaacggtgttgacgcgatcgtctttaccgcaggagttggcgaaaatagcccgattatgcgcgaagaaattattgagaactacttgggccctttagggatcaagatcgataaagaagccaatgacttcaaaggtgaggagaagatcatttcaacgcccgattccaaagtgattgcgatggtagttccgaccaacgaggagctcatgatcgccaaagacacgaaagaaatcattgagaaagggttggacgagcttaagatc

SEQ ID NO: 1152 - protein, 417 aa, synthetic construct
  REGION 1..417: note = variant of acetate kinase from Marinitoga sp.38H-ov
MHHHHHHGGSGMKVLVINSGSSSIKYQLLDMTNEKVLAKGLVERIGIDGSRIVHKVNGEGHVLEHEIKNHEIGLKLVLDLLTDEKYGVLKDLKEIDAVGHRVVHGGERFASSVKITDEVLKTIETLSFLAPLHNPANIMGIKSSMKVLPGVPQVAVFDTAFHQKMPEKAYLYAIPYEYYEKYKIRRYGFHGTSHRYVSKRAAEIMGKPYDQLKIITVHVGNGASVAAVKNGVSVDTSMGFTPLEGLVMGTRSGDIDPAIVEFLEKEEGLSAKEVVNILNKKSGVYGLTKGFSRDMRDIVLKAIEGDPVCRLALDVYYYRIAKYIGAYAAAMNGVDAIVFTAGVGENSPIMREEIIENYLGPLGIKIDKEANDFKGEEKIISTPDSKVIAMVVPTNEELMIAKDTKEIIEKGLDELKI

SEQ ID NO: 1153 - DNA, 1251 bp, synthetic construct
  misc_feature 1..1251: note = variant of acetate kinase from Marinitoga sp.38H-ov
  source 1..1251: mol_type = other DNA
atgcaccatcatcatcatcatggcggtagcggcatgaaagttctggtgattaattctggtagctcctccatcaaatatcagctcctcgatatgaccaacgaaaaggtattagcgaaaggcttggtcgagcgcattggcatcgacggttcgcgtatcgtgcataaagttaacggcgaagggcacgtgctggaacatgagattaaaaatcacgaaattggacttaaattggtcctggatcttcttacggacgaaaaatacggtgtgttgaaggatctcaaagaaatcgatgcagttgggcatcgcgtagtacatggcggcgagcgttttgccagtagcgtgttgattactgacgaagtcttaaagaccatcgagacgttgtcgttcttagctccgttacacaatccagcgaacattatgggtatcaagagcagcatgaaagtgttaccgggtgtgcctcaagttgccgtctttgatacagcgttccaccagaagatgccggagaaagcctatttgtacgcaatcccctatgagtactacgagaaatataaaattcgccgctatgggtttcatggaacctcacatcgttatgtgagtaaacgtgctgcggaaattatgggcaaaccgtacgatcagctcaagatcattaccgttcacgtgggtaacggcgcatcagttgcggcggtgaagaatggcgtatctgttgacacttccatgggtttcacaccacttgaaggtcttgtcatgggcacgcgcagcggcgatattgatccggccatcgtggaatttcttgagaaagaagaaggattgtcggccaaagaagtcgtcaacatcctcaacaagaaatctggtgtgtatgggctcaccaaaggctttagtagggacatgcgtgacattgtgctgaaggctattgaaggtgatcctgtatgccgccttgcattagatgtgtattattatcgtatcgcgaaatatattggcgcatacgctgcggccatgaacggtgttgacgcgatcgtctttaccgcaggagttggcgaaaatagcccgattatgcgcgaagaaattattgagaactacttgggctacttagggatcaagatcgataaagaagccaatgacttcaaaggtgaggagaagatcatttcaacgcccgattccaaagtgattgcgatggtagttccgaccaacgaggagctcatgatcgccaaagacacgaaagaaatcattgagaaagggttggacgagcttaagatc

SEQ ID NO: 1154 - protein, 417 aa, synthetic construct
  REGION 1..417: note = variant of acetate kinase from Marinitoga sp.38H-ov
MHHHHHHGGSGMKVLVINSGSSSIKYQLLDMTNEKVLAKGLVERIGIDGSRIVHKVNGEGHVLEHEIKNHEIGLKLVLDLLTDEKYGVLKDLKEIDAVGHRVVHGGERFASSVLITDEVLKTIETLSFLAPLHNPANIMGIKSSMKVLPGVPQVAVFDTAFHQKMPEKAYLYAIPYEYYEKYKIRRYGFHGTSHRYVSKRAAEIMGKPYDQLKIITVHVGNGASVAAVKNGVSVDTSMGFTPLEGLVMGTRSGDIDPAIVEFLEKEEGLSAKEVVNILNKKSGVYGLTKGFSRDMRDIVLKAIEGDPVCRLALDVYYYRIAKYIGAYAAAMNGVDAIVFTAGVGENSPIMREEIIENYLGYLGIKIDKEANDFKGEEKIISTPDSKVIAMVVPTNEELMIAKDTKEIIEKGLDELKI

SEQ ID NO: 1155 - DNA, 1251 bp, synthetic construct
  misc_feature 1..1251: note = variant of acetate kinase from Marinitoga sp.38H-ov
  source 1..1251: mol_type = other DNA
atgcaccatcatcatcatcatggcggtagcggcatgaaagttctggtgattaattctggtagctcctccatcaaatatcagctcctcgatatgaccaacgaaaaggtattagcgaaaggcttggtcgagcgcattggcatcgacggttcgcgtatcgtgcataaagttaacggcgaagggcacgtgctggaacatgagattaaaaatcacgaaattggacttaaattggtcctggatcttcttacggacgaaaaatacggtgtgttgaaggatctcaaagaaatcgatgcagttgggcatcgcgtagtacatggcggcgagcgttttgccagtagcgtgaagattactgacgaagtcttaaagaccatcgagacgttgtcgttcttagctccgttacacaatccagcgaacattatgggtatcaagagcagcatgaaagtgttaccgggtgtgcctcaagttgccgtctttgatacagcgttccaccagaagatgccggagaaagcctatttgtacgcaatcccctatgagtactacgagaaatataaaattcgccgctatgggtttcatggaacctcacatcgttatgtgagtaaacgtgctgcggaaattatgggcactccgtacgatcagctcaagatcattaccgttcacgtgggtaacggcgcatcagttgcggcggtgaagaatggcgtatctgttgacacttccatgggtttcacaccacttgaaggtcttgtcatgggcacgcgcagcggcgatattgatccggccatcgtggaatttcttgagaaagaagaaggattgtcggccaaagaagtcgtcaacatcctcaacaagaaatctggtgtgtatgggctcaccaaaggctttagtagggacatgcgtgacattgtgctgaaggctattgaaggtgatcctgtatgccgccttgcattagatgtgtattattatcgtatcgcgaaatatattggcgcatacgctgcggccatgaacggtgttgacgcgatcgtctttaccgcaggagttggcgaaaatagcccgattatgcgcgaagaaattattgagaactacttgggctacttagggatcaagatcgataaagaagccaatgacttcaaaggtgaggagaagatcatttcaacgcccgattccaaagtgattgcgatggtagttccgaccaacgaggagctcatgatcgccaaagacacgaaagaaatcattgagaaagggttggacgagcttaagatc

SEQ ID NO: 1156 - protein, 417 aa, synthetic construct
  REGION 1..417: note = variant of acetate kinase from Marinitoga sp.38H-ov
MHHHHHHGGSGMKVLVINSGSSSIKYQLLDMTNEKVLAKGLVERIGIDGSRIVHKVNGEGHVLEHEIKNHEIGLKLVLDLLTDEKYGVLKDLKEIDAVGHRVVHGGERFASSVKITDEVLKTIETLSFLAPLHNPANIMGIKSSMKVLPGVPQVAVFDTAFHQKMPEKAYLYAIPYEYYEKYKIRRYGFHGTSHRYVSKRAAEIMGTPYDQLKIITVHVGNGASVAAVKNGVSVDTSMGFTPLEGLVMGTRSGDIDPAIVEFLEKEEGLSAKEVVNILNKKSGVYGLTKGFSRDMRDIVLKAIEGDPVCRLALDVYYYRIAKYIGAYAAAMNGVDAIVFTAGVGENSPIMREEIIENYLGYLGIKIDKEANDFKGEEKIISTPDSKVIAMVVPTNEELMIAKDTKEIIEKGLDELKI

SEQ ID NO: 1157 - DNA, 1251 bp, synthetic construct
  misc_feature 1..1251: note = variant of acetate kinase from Marinitoga sp.38H-ov
  source 1..1251: mol_type = other DNA
atgcaccatcatcatcatcatggcggtagcggcatgaaagttctggtgattaattctggtagctcctccatcaaatatcagctcctcgatatgaccaacgaaaaggtattagcgaaaggcttggtcgagcgcattggcatcgacggttcgcgtatcgtgcataaagttaacggcgaagggcacgtgctggaacatgagattaaaaatcacgaaattggacttaaattggtcctggatcttcttacggacgaaaaatacggtgtgttgaaggatctcaaagaaatcgatgcagttgggcatcgcgtagtacatggcggcgagcgttttgccagtagcgtgaagattactgacgaagtcttaaagaccatcgagacgttgtcgttcttagctccgttacacaatccagcgaacattatgggtatcaagagcagcatgaaagtgttaccgggtgtgcctcaagttgccgtctttgatacagcgttccaccagaagatgccggagaaagcctatttgtacgcaatcccctatgagtactacgagaaatataaaattcgccgctatgggtttcatggaacctcacatcgttatgtgagtaaacgtgctgcggaaattatgggcaaaccgtacgatcagctcaagatcattaccgttcacgtgggtaacggcgcatcagttgcggcggtgactaatggcgtatctgttgacacttccatgggtttcacaccacttgaaggtcttgtcatgggcacgcgcagcggcgatattgatccggccatcgtggaatttcttgagaaagaagaaggattgtcggccaaagaagtcgtcaacatcctcaacaagaaatctggtgtgtatgggctcaccaaaggctttagtagggacatgcgtgacattgtgctgaaggctattgaaggtgatcctgtatgccgccttgcattagatgtgtattattatcgtatcgcgaaatatattggcgcatacgctgcggccatgaacggtgttgacgcgatcgtctttaccgcaggagttggcgaaaatagcccgattatgcgcgaagaaattattgagaactacttgggctacttagggatcaagatcgataaagaagccaatgacttcaaaggtgaggagaagatcatttcaacgcccgattccaaagtgattgcgatggtagttccgaccaacgaggagctcatgatcgccaaagacacgaaagaaatcattgagaaagggttggacgagcttaagatc

SEQ ID NO: 1158 - protein, 417 aa, synthetic construct
  REGION 1..417: note = variant of acetate kinase from Marinitoga sp.38H-ov
MHHHHHHGGSGMKVLVINSGSSSIKYQLLDMTNEKVLAKGLVERIGIDGSRIVHKVNGEGHVLEHEIKNHEIGLKLVLDLLTDEKYGVLKDLKEIDAVGHRVVHGGERFASSVKITDEVLKTIETLSFLAPLHNPANIMGIKSSMKVLPGVPQVAVFDTAFHQKMPEKAYLYAIPYEYYEKYKIRRYGFHGTSHRYVSKRAAEIMGKPYDQLKIITVHVGNGASVAAVTNGVSVDTSMGFTPLEGLVMGTRSGDIDPAIVEFLEKEEGLSAKEVVNILNKKSGVYGLTKGFSRDMRDIVLKAIEGDPVCRLALDVYYYRIAKYIGAYAAAMNGVDAIVFTAGVGENSPIMREEIIENYLGYLGIKIDKEANDFKGEEKIISTPDSKVIAMVVPTNEELMIAKDTKEIIEKGLDELKI

SEQ ID NO: 1159 - DNA, 1251 bp, synthetic construct
  misc_feature 1..1251: note = variant of acetate kinase from Marinitoga sp.38H-ov
  source 1..1251: mol_type = other DNA
atgcaccatcatcatcatcatggcggtagcggcatgaaagttctggtgattaattctggtagctcctccatcaaatatcagctcctcgatatgaccaacgaaaaggtattagcgaaaggcttggtcgagcgcattggcatcgacggttcgcgtatcgtgcataaagttaacggcgaagggcacgtgctggaacatgagattaaaaatcacgaaattggacttaaattggtcctggatcttcttacggacgaaaaatacggtgtgttgaaggatctcaaagaaatcgatgcagttgggcatcgcgtagtacatggcggcgagcgttttgccagtagcgtgaagattactgacgaagtcttaaagaccatcgagacgttgtcgttcttagctccgttacacaatccagcgaacattatgggtatcaagagcagcatgaaagtgttaccgggtgtgcctcaagttgccgtctttgatacagcgttccaccagaagatgccggagaaagcctatttgtacgcaatcccctatgagtactacgagaaatataaaattcgccgctatgggtttcatggaacctcacatcgttatgtgagtaaacgtgctgcggaaattatgggcaaaccgtacgatcagctcaagatcattaccgttcacgtgggtaacggcgcatcagttgcggcggtgaagaatggcgtatctgttgacacttccatgggtttcacaccacttgaaggtcttgtcatgggcacgcgcagcggcgatattgatccggccatcgtggaatttcttgagaaagaagaaggattgtcggccaaagaagtcgtcaacatcctcaacaagaaatctggtgtgtatgggctcaccaaaggctttagtagggacatgcgtgacattgtgctgaaggctattgaaggtgatcctgtatgccgccttgcattagatgtgtattattatcgtatcgcgaaatatattggcgcatacgctgcggccatgaacggtgttgacgcgatcgtctttaccgcaggagttggcgaaaatagcccgattatgcgcgaagaaattattgagaactacttgggctacttagggatcaagatcgataaagaagccaatgacttcaaaggtgaggagaagatcatttcaacgcgtgattccaaagtgattgcgatggtagttccgaccaacgaggagctcatgatcgccaaagacacgaaagaaatcattgagaaagggttggacgagcttaagatc

SEQ ID NO: 1160 - protein, 417 aa, synthetic construct
  REGION 1..417: note = variant of acetate kinase from Marinitoga sp.38H-ov
MHHHHHHGGSGMKVLVINSGSSSIKYQLLDMTNEKVLAKGLVERIGIDGSRIVHKVNGEGHVLEHEIKNHEIGLKLVLDLLTDEKYGVLKDLKEIDAVGHRVVHGGERFASSVKITDEVLKTIETLSFLAPLHNPANIMGIKSSMKVLPGVPQVAVFDTAFHQKMPEKAYLYAIPYEYYEKYKIRRYGFHGTSHRYVSKRAAEIMGKPYDQLKIITVHVGNGASVAAVKNGVSVDTSMGFTPLEGLVMGTRSGDIDPAIVEFLEKEEGLSAKEVVNILNKKSGVYGLTKGFSRDMRDIVLKAIEGDPVCRLALDVYYYRIAKYIGAYAAAMNGVDAIVFTAGVGENSPIMREEIIENYLGYLGIKIDKEANDFKGEEKIISTRDSKVIAMVVPTNEELMIAKDTKEIIEKGLDELKI

SEQ ID NO: 1161 - DNA, 1251 bp, synthetic construct
  misc_feature 1..1251: note = variant of acetate kinase from Marinitoga sp.38H-ov
  source 1..1251: mol_type = other DNA
atgcaccatcatcatcatcatggcggtagcggcatgaaagttctggtgattaattctggtagctcctccatcaaatatcagctcctcgatatgaccaacgaaaaggtattagcgaaaggcttggtcgagcgcattggcatcgacggttcgcgtatcgtgcataaagttaacggcgaagggcacgtgctggaacatgagattaaaaatcacgaaattggacttaaattggtcctggatcttcttacggacgaaaaatacggtgtgttgaaggatctcaaagaaatcgatgcagttgggcatcgcgtagtacatggcggcgagcgttttgccagtagcgtgaagattactgacgaagtcttaaagaccatcgagacgttgtcgttcttagctccgttacacaatccagcgaacattatgggtatcaagagcagcatgaaagtgttaccgggtgtgcctcaagttgccgtctttgatacagcgttccaccagaagatgccggagaaagcctatttgtacgcaatcccctatgagtactacgagaaatataaaattcgccgctatgggtttcatggaacctcacatcgttatgtgagtaaacgtgctgcggaaattatgggcaaaccgagggatcagctcaagatcattaccgttcacgtgggtaacggcgcatcagttgcggcggtgaagaatggcgtatctgttgacacttccatgggtttcacaccacttgaaggtcttgtcatgggcacgcgcagcggcgatattgatccggccatcgtggaatttcttgagaaagaagaaggattgtcggccaaagaagtcgtcaacatcctcaacaagaaatctggtgtgtatgggctcaccaaaggctttagtagggacatgcgtgacattgtgctgaaggctattgaaggtgatcctgtatgccgccttgcattagatgtgtattattatcgtatcgcgaaatatattggcgcatacgctgcggccatgaacggtgttgacgcgatcgtctttaccgcaggagttggcgaaaatagcccgattatgcgcgaagaaattattgagaactacttgggctacttagggatcaagatcgataaagaagccaatgacttcaaaggtgaggagaagatcatttcaacgcccgattccaaagtgattgcgatggtagttccgaccaacgaggagctcatgatcgccaaagacacgaaagaaatcattgagaaagggttggacgagcttaagatc

SEQ ID NO: 1162 - protein, 417 aa, synthetic construct
  REGION 1..417: note = variant of acetate kinase from Marinitoga sp.38H-ov
MHHHHHHGGSGMKVLVINSGSSSIKYQLLDMTNEKVLAKGLVERIGIDGSRIVHKVNGEGHVLEHEIKNHEIGLKLVLDLLTDEKYGVLKDLKEIDAVGHRVVHGGERFASSVKITDEVLKTIETLSFLAPLHNPANIMGIKSSMKVLPGVPQVAVFDTAFHQKMPEKAYLYAIPYEYYEKYKIRRYGFHGTSHRYVSKRAAEIMGKPRDQLKIITVHVGNGASVAAVKNGVSVDTSMGFTPLEGLVMGTRSGDIDPAIVEFLEKEEGLSAKEVVNILNKKSGVYGLTKGFSRDMRDIVLKAIEGDPVCRLALDVYYYRIAKYIGAYAAAMNGVDAIVFTAGVGENSPIMREEIIENYLGYLGIKIDKEANDFKGEEKIISTPDSKVIAMVVPTNEELMIAKDTKEIIEKGLDELKI

SEQ ID NO: 1163 - DNA, 1251 bp, synthetic construct
  misc_feature 1..1251: note = variant of acetate kinase from Marinitoga sp.38H-ov
  source 1..1251: mol_type = other DNA
atgcaccatcatcatcatcatggcggtagcggcatgaaagttctggtgattaattctggtagctcctccatcaaatatcagctcctcgatatggccaacgaaaaggtattagcgaaaggcttggtcgagcgcattggcatcgacggttcgcgtatcgtgcataaagttaacggcgaagggcacgtgctggaacatgagattaaaaatcacgaaattggacttaaattggtcctggatcttcttacggacgaaaaatacggtctgttgaaggatctcaaagaaatcgatgcagttgggcatcgcgtagtacatggcggcgagcgttttgccagtagcgtgaagattactgacgaagtcttaaagaccatcgagacgttgtcgttcttagctccgttacacaatccagcgaacattatgggtatcaagagcagcatgaaagtgttaccgggtgtgcctcaagttgccgtctttgatacagcgttccaccagaagatgccggagaaagcctatttgtacgcaatcccctatgagtactacgagaaatataaaattcgccgctatgggtttcatggaacctcacatcgttatgtgagtaaacgtgctgcggaaattatgggcaaaccgtacgatcagctcaagatcattaccgttcacgtgggtaacggcgcatcagttgcggcggtgaagaatggcgtatctgttgacacttccatgggtttcacaccacttgaaggtcttgtcatgggcacgcgcagcggcgatattgatccggccatcgtggaatttcttgagaaagaagaaggattgtcggccaaagaagtcgtcaacatcctcaacaagaaatctggtgtgtatgggctcaccaaaggctttagtagggacatgcgtgacattgtgctgaaggctattgaaggtgatcctgtatgccgccttgcattagatgtgtattattatcgtatcgcgaaatatattggcgcatacgctgcggccatgaacggtgttgacgcgatcgtctttaccgcaggagttggcgaaaatagcccgattatgcgcgaagaaattattgagaactacttgggctacttagggatcaagatcgataaagaagccaatgacttcaaaggtgaggagaagatcatttcaacgcccgattccaaagtgattgcgatggtagttccgaccaacgaggagctcatgatcgccaaagacacgaaagaaatcattgagaaagggttggacgagcttaagatc

SEQ ID NO: 1164 - protein, 417 aa, synthetic construct
  REGION 1..417: note = variant of acetate kinase from Marinitoga sp.38H-ov
MHHHHHHGGSGMKVLVINSGSSSIKYQLLDMANEKVLAKGLVERIGIDGSRIVHKVNGEGHVLEHEIKNHEIGLKLVLDLLTDEKYGLLKDLKEIDAVGHRVVHGGERFASSVKITDEVLKTIETLSFLAPLHNPANIMGIKSSMKVLPGVPQVAVFDTAFHQKMPEKAYLYAIPYEYYEKYKIRRYGFHGTSHRYVSKRAAEIMGKPYDQLKIITVHVGNGASVAAVKNGVSVDTSMGFTPLEGLVMGTRSGDIDPAIVEFLEKEEGLSAKEVVNILNKKSGVYGLTKGFSRDMRDIVLKAIEGDPVCRLALDVYYYRIAKYIGAYAAAMNGVDAIVFTAGVGENSPIMREEIIENYLGYLGIKIDKEANDFKGEEKIISTPDSKVIAMVVPTNEELMIAKDTKEIIEKGLDELKI

SEQ ID NO: 1165 - DNA, 1251 bp, synthetic construct
  misc_feature 1..1251: note = variant of acetate kinase from Marinitoga sp.38H-ov
  source 1..1251: mol_type = other DNA
atgcaccatcatcatcatcatggcggtagcggcatgaaagttctggtgattaattctggtagctcctccatcaaatatcagctcctcgatatgaccaacgaaaaggtattagcgaaaggcttggtcgagcgcattggcatcgacggttcgcgtatcgtgcataaagttaacggcgaagggcacgtgctggaacatgagattaaaaatcacgaaattggacttaaattggtcctggatcttcttacggacgaaaaatacggtgtgttgaaggatctcaaagaaatcgatgcagttgggcatcgcgtagtacatggcggcgagcgttttgccagtagcgtgaagattactgacgaagtcttaaagaccatcgagacgttgtcgttcttagctccgttacacaatccagcgaacattatgggtatcaagagcagcatgaaagtgttatgtggtgtgcctcaagttgccgtctttgatacagcgttccaccagaagatgccggagaaagcctatttgtacgcaatcccctatgagtactacgagaaatataaaattcgccgctatgggtttcatggaacctcacatcgttatgtgagtaaacgtgctgcggaaattatgggcaaaccgtacgatcagctcaagatcattaccgttcacgtgggtaacggcgcatcagttgcggcggtgaagaatggcgtatctgttgacacttccatgggtttcacaccacttgaaggtcttgtcatgggcacgcgcagcggcgatattgatccggccatcgtggaatttcttgagaaagaagaaggattgtcggccaaagaagtcgtcaacatcctcaacaagaaatctggtgtgtatgggctcaccaaaggctttagtagggacatgcgtgacattgtgctgaaggctattgaaggtgatcctgtatgccgccttgcattagatgtgtattattatcgtatcgcgaaatatattggcgcatacgctgcggccatgaacggtgttgacgcgatcgtctttaccgcaggagttggcgaaaatagcccgattatgcgcgaagaaattattgagaactacttgggctacttagggatcaagatcgataaagaagccaatgacttcaaaggtgaggagaagatcatttcaacgcccgattccaaagtgattgcgatggtagttccgaccaacgaggagctcatgatcgccaaagacacgaaagaaatcattgagaaagggttggacgagcttaagatc

SEQ ID NO: 1166 - protein, 417 aa, synthetic construct
  REGION 1..417: note = variant of acetate kinase from Marinitoga sp.38H-ov
MHHHHHHGGSGMKVLVINSGSSSIKYQLLDMTNEKVLAKGLVERIGIDGSRIVHKVNGEGHVLEHEIKNHEIGLKLVLDLLTDEKYGVLKDLKEIDAVGHRVVHGGERFASSVKITDEVLKTIETLSFLAPLHNPANIMGIKSSMKVLCGVPQVAVFDTAFHQKMPEKAYLYAIPYEYYEKYKIRRYGFHGTSHRYVSKRAAEIMGKPYDQLKIITVHVGNGASVAAVKNGVSVDTSMGFTPLEGLVMGTRSGDIDPAIVEFLEKEEGLSAKEVVNILNKKSGVYGLTKGFSRDMRDIVLKAIEGDPVCRLALDVYYYRIAKYIGAYAAAMNGVDAIVFTAGVGENSPIMREEIIENYLGYLGIKIDKEANDFKGEEKIISTPDSKVIAMVVPTNEELMIAKDTKEIIEKGLDELKI

SEQ ID NO: 1167 - DNA, 1251 bp, synthetic construct
  misc_feature 1..1251: note = variant of acetate kinase from Marinitoga sp.38H-ov
  source 1..1251: mol_type = other DNA
atgcaccatcatcatcatcatggcggtagcggcatgaaagttctggtgattaattctggtagctcctccatcaaatatcagctcctcgatatgaccaacgaaaaggctttagcgaaaggcttggtcgagcgcattggcatcgacggttcgcgtatcgtgcataaagttaacggcgaagggcacgtgctggaacatgagattaaaaatcacgaaattggacttaaattggtcctggatcttcttacggacgaaaaatacggtgtgttgaaggatctcaaagaaatcgatgcagttgggcatcgcgtagtacatggcggcgagcgttttgccagtagcgtgaagattactgacgaagtcttaaagaccatcgagacgttgtcgttcttagctccgttacacaatccagcgaacattatgggtatcaagagcagcatgaaagtgttaccgggtgtgcctcaagttgccgtctttgatacagcgttccaccagaagatgccggagaaagcctatttgtacgcaatcccctatgagtactacgagaaatataaaattcgccgctatgggtttcatggaacctcacatcgttatgtgagtaaacgtgctgcggaaattatgggcaaaccgtacgatcagctcaagatcattaccgttcacgtgggtaacggcgcatcagttgcggcggtgaagaatggcgtatctgttgacacttccatgggtttcacaccacttgaaggtcttgtcatgggcacgcgcagcggcgatattgatccggccatcgtggaatttcttgagaaagaagaaggattgtcggccaaagaagtcgtcaacatcctcaacaagaaatctggtgtgtatgggctcaccaaaggctttagtagggacatgcgtgacattgtgctgaaggctattgaaggtgatcctgtatgccgccttgcattagatgtgtattattatcgtatcgcgaaatatattggcgcatacgctgcggccatgaacggtgttgacgcgatcgtctttaccgcaggagttggcgaaaatagcccgattatgcgcgaagaaattattgagaactacttgggctacttagggatcaagatcgataaagaagccaatgacttcaaaggtgaggagaagatcatttcaacgcccgattccaaagtgattgcgatggtagttccgaccaacgaggagctcatgatcgccaaagacacgaaagaaatcattgagaaagggttggacgagcttaagatc

SEQ ID NO: 1168 - protein, 417 aa, synthetic construct
  REGION 1..417: note = variant of acetate kinase from Marinitoga sp.38H-ov
MHHHHHHGGSGMKVLVINSGSSSIKYQLLDMTNEKALAKGLVERIGIDGSRIVHKVNGEGHVLEHEIKNHEIGLKLVLDLLTDEKYGVLKDLKEIDAVGHRVVHGGERFASSVKITDEVLKTIETLSFLAPLHNPANIMGIKSSMKVLPGVPQVAVFDTAFHQKMPEKAYLYAIPYEYYEKYKIRRYGFHGTSHRYVSKRAAEIMGKPYDQLKIITVHVGNGASVAAVKNGVSVDTSMGFTPLEGLVMGTRSGDIDPAIVEFLEKEEGLSAKEVVNILNKKSGVYGLTKGFSRDMRDIVLKAIEGDPVCRLALDVYYYRIAKYIGAYAAAMNGVDAIVFTAGVGENSPIMREEIIENYLGYLGIKIDKEANDFKGEEKIISTPDSKVIAMVVPTNEELMIAKDTKEIIEKGLDELKI

SEQ ID NO: 1169 - DNA, 1251 bp, synthetic construct
  misc_feature 1..1251: note = variant of acetate kinase from Marinitoga sp.38H-ov
  source 1..1251: mol_type = other DNA
atgcaccatcatcatcatcatggcggtagcggcatgaaagttctggtgattaattctggtagctcctccatcaaatatcagctcctcgatatgaccaacgaaaaggtattagcgaaaggcttggtcgagcgcattggcatcgacggttcgcgtatcgtgcataaagttaacggcgaagggcacgtgctggaacatgagattaaaaatcacgaaattggacttaaattggtcctggatcttcttacggacgaaaaatacggtgtgttgaaggatctcaaagaaatcgatgcagttgggcatcgcgtagtacatggcggcgagcgttttgccagtagcgtgaagattactgacgaagtcttaaagaccatcgagacgttgtcgttcttagctccgttacacaatccagcgaacattatgggtatcaagagcagcatgaaagtgttaccgggtgtgcctcaagttgccgtctttgatacagcgttccaccagaagatgccggagaaagcctatttgtacgcaatcccctatgagtactacgagaaatataaaattcgccgctatgggtttcatggaacctcacatcgttatgtgagtaaacgtgctgcggaaattatgggcctgccgtacgatcagctcaagatcattaccgttcacgtgggtaacggcgcatcagttgcggcggtgaagaatggcgtatctgttgacacttccatgggtttcacaccacttgaaggtcttgtcatgggcacgcgcagcggcgatattgatccggccatcgtggaatttcttgagaaagaagaaggattgtcggccaaagaagtcgtcaacatcctcaacaagaaatctggtgtgtatgggctcaccaaaggctttagtagggacatgcgtgacattgtgctgaaggctattgaaggtgatcctgtatgccgccttgcattagatgtgtattattatcgtatcgcgaaatatattggcgcatacgctgcggccatgaacggtgttgacgcgatcgtctttaccgcaggagttggcgaaaatagcccgattatgcgcgaagaaattattgagaactacttgggctacttagggatcaagatcgataaagaagccaatgacttcaaaggtgaggagaagatcatttcaacgcccgattccaaagtgattgcgatggtagttccgaccaacgaggagctcatgatcgccaaagacacgaaagaaatcattgagaaagggttggacgagcttaagatc

SEQ ID NO: 1170 - protein, 417 aa, synthetic construct
  REGION 1..417: note = variant of acetate kinase from Marinitoga sp.38H-ov
MHHHHHHGGSGMKVLVINSGSSSIKYQLLDMTNEKVLAKGLVERIGIDGSRIVHKVNGEGHVLEHEIKNHEIGLKLVLDLLTDEKYGVLKDLKEIDAVGHRVVHGGERFASSVKITDEVLKTIETLSFLAPLHNPANIMGIKSSMKVLPGVPQVAVFDTAFHQKMPEKAYLYAIPYEYYEKYKIRRYGFHGTSHRYVSKRAAEIMGLPYDQLKIITVHVGNGASVAAVKNGVSVDTSMGFTPLEGLVMGTRSGDIDPAIVEFLEKEEGLSAKEVVNILNKKSGVYGLTKGFSRDMRDIVLKAIEGDPVCRLALDVYYYRIAKYIGAYAAAMNGVDAIVFTAGVGENSPIMREEIIENYLGYLGIKIDKEANDFKGEEKIISTPDSKVIAMVVPTNEELMIAKDTKEIIEKGLDELKI

SEQ ID NO: 1171 - DNA, 1251 bp, synthetic construct
  misc_feature 1..1251: note = variant of acetate kinase from Marinitoga sp.38H-ov
  source 1..1251: mol_type = other DNA
atgcaccatcatcatcatcatggcggtagcggcatgaaagttctggtgattaattctggtagctcctccatcaaatatcagctcctcgatatgaccaacgaaaaggtattagcgaaaggcttggtcgagcgcattggcatcgacggttcgcgtatcgtgcataaagttaacggcgaagggcacgtgctggaacatgagattaaaaatcacgaaattggacttaaattggtcctggatcttcttacggacgaaaaatacggtttgttgaaggatctcaaagaaatcgatgcagttgggcatcgcgtagtacatggcggcgagcgttttgccagtagcgtgaagattactgacgaagtcttaaagaccatcgagacgttgtcgttcttagctccgttacacaatccagcgaacattatgggtatcaagagcagcatgaaagtgttaccgggtgtgcctcaagttgccgtctttgatacagcgttccaccagaagatgccggagaaagcctatttgtacgcaatcccctatgagtactacgagaaatataaaattcgccgctatgggtttcatggaacctcacatcgttatgtgagtaaacgtgctgcggaaattatgggcaaaccgtacgatcagctcaagatcattaccgttcacgtgggtaacggcgcatcagttgcggcggtgaagaatggcgtatctgttgacacttccatgggtttcacaccacttgaaggtcttgtcatgggcacgcgcagcggcgatattgatccggccatcgtggaatttcttgagaaagaagaaggattgtcggccaaagaagtcgtcaacatcctcaacaagaaatctggtgtgtatgggctcaccaaaggctttagtagggacatgcgtgacattgtgctgaaggctattgaaggtgatcctgtatgccgccttgcattagatgtgtattattatcgtatcgcgaaatatattggcgcatacgctgcggccatgaacggtgttgacgcgatcgtctttaccgcaggagttggcgaaaatagcccgattatgcgcgaagaaattattgagaactacttgggctacttagggatcaagatcgataaagaagccaatgacttcaaaggtgaggagaagatcatttcaacgcccgattccaaaacgattgcgatggtagttccgaccaacgaggagctcatgatcgccaaagacacgaaagaaatcattgagaaagggttggacgagcttaagatc

SEQ ID NO: 1172 - protein, 417 aa, synthetic construct
  REGION 1..417: note = variant of acetate kinase from Marinitoga sp.38H-ov
MHHHHHHGGSGMKVLVINSGSSSIKYQLLDMTNEKVLAKGLVERIGIDGSRIVHKVNGEGHVLEHEIKNHEIGLKLVLDLLTDEKYGLLKDLKEIDAVGHRVVHGGERFASSVKITDEVLKTIETLSFLAPLHNPANIMGIKSSMKVLPGVPQVAVFDTAFHQKMPEKAYLYAIPYEYYEKYKIRRYGFHGTSHRYVSKRAAEIMGKPYDQLKIITVHVGNGASVAAVKNGVSVDTSMGFTPLEGLVMGTRSGDIDPAIVEFLEKEEGLSAKEVVNILNKKSGVYGLTKGFSRDMRDIVLKAIEGDPVCRLALDVYYYRIAKYIGAYAAAMNGVDAIVFTAGVGENSPIMREEIIENYLGYLGIKIDKEANDFKGEEKIISTPDSKTIAMVVPTNEELMIAKDTKEIIEKGLDELKI

SEQ ID NO: 1173 - DNA, 1251 bp, synthetic construct
  misc_feature 1..1251: note = variant of acetate kinase from Marinitoga sp.38H-ov
  source 1..1251: mol_type = other DNA
atgcaccatcatcatcatcatggcggtagcggcatgaaagttctggtgattaattctggtagctcctccatcaaatatcagctcctcgatatgaccaacgaaaaggtattagcgaaaggcttggtcgagcgcattggcatcgacggttcgcgtatcgtgcataaagttaacggcgaagggcacgtgctggaacatgagattaaaaatcacgaaattggacttaaattggtcctggatcttcttacggacgaaaaatacggtgtgttgaaggatctcaaagaaatcgatgcagttgggcatcgcgtagtacatggcggcgagcgttttgccagtagcgtgaagattactgacgaagtcttaaagaccatcgagacgttgtcgttcttagctccgttacacaatccagcgaacattatgggtatcaagagcagcatgaaagtgttaccgggtgtgcctcaagttgccgtctttgatacagcgttccaccagaagatgccggagaaagcctatttgtacgcaatcccctatgagtactacgagaaatataaaattcgccgctatgggtttcatggaacctcacatcgttatgtgagtaaacgtgctgcggaaattatgggcaaaccgtacgatcagctcaagatcattaccgttcacgtgggtaacggcgcatcagttgcggcggtgaagaatggcgtatctgttgacacttccatgggtttcacaccacttgaaggtcttgtcatgggcacgcgcagcggcgatattgatccggccatcgtggaatttcttgagaaagaagaaggattgtcggccaaagaagtcgtcaacatcctcaacaagaaatctggtgtgtatgggctcaccaaaggctttagtagggacatgcgtgacattgtgctgaaggctattgaaggtgatcctgtatgccgccttgcattagatgtgtattattatcgtatcgcgaaatatattggcgcatacgctgcggccatgaacggtgttgacgcgatcgtctttaccgcaggagttggcgaaaatagcccgattatgcgcgaagaaattattgagaactacttgaggtacttagggatcaagatcgataaagaagccaatgacttcaaaggtgaggagaagatcatttcaacgcccgattccaaagtgattgcgatggtagttccgaccaacgaggagctcatgatcgccaaagacacgaaagaaatcattgagaaagggttggacgagcttaagatc

SEQ ID NO: 1174 - protein, 417 aa, synthetic construct
  REGION 1..417: note = variant of acetate kinase from Marinitoga sp.38H-ov
MHHHHHHGGSGMKVLVINSGSSSIKYQLLDMTNEKVLAKGLVERIGIDGSRIVHKVNGEGHVLEHEIKNHEIGLKLVLDLLTDEKYGVLKDLKEIDAVGHRVVHGGERFASSVKITDEVLKTIETLSFLAPLHNPANIMGIKSSMKVLPGVPQVAVFDTAFHQKMPEKAYLYAIPYEYYEKYKIRRYGFHGTSHRYVSKRAAEIMGKPYDQLKIITVHVGNGASVAAVKNGVSVDTSMGFTPLEGLVMGTRSGDIDPAIVEFLEKEEGLSAKEVVNILNKKSGVYGLTKGFSRDMRDIVLKAIEGDPVCRLALDVYYYRIAKYIGAYAAAMNGVDAIVFTAGVGENSPIMREEIIENYLRYLGIKIDKEANDFKGEEKIISTPDSKVIAMVVPTNEELMIAKDTKEIIEKGLDELKI

SEQ ID NO: 1175 - DNA, 1251 bp, synthetic construct
  misc_feature 1..1251: note = variant of acetate kinase from Marinitoga sp.38H-ov
  source 1..1251: mol_type = other DNA
atgcaccatcatcatcatcatggcggtagcggcatgaaagttctggtgattaattctggtagctcctccatcaaatatcagctcctcgatatgaccaacgaaaaggtattagcgaaaggcttggtcgagcgcattggcatcgacggttcgcgtatcgtgcataaagttaacggcgaagggcacgtgctggaacatgagattaaaaatcacgaaattggacttaaattggtcctggatcttcttacggacgaaaaatacggtgtgttgaaggatctcaaagaaatcgatgcagttgggcatcgcgtagtacatggcggcgagcgttttgccagtagcgtgaagattactgacgaagtcttaaagaccatcgagacgttgtcgttcttagctccgttacacaatccagcgaacattatgggtatcaagagcagcatgaaagtgttaccgggtgtgcctcaagttgccgtctttgatacagcgttccaccagaagatgccggagaaagcctatttgtacgcaatcccctatgagtactacgagaaatataatattcgccgctatgggtttcatggaacctcacatcgttatgtgagtaaacgtgctgcggaaattatgggcaaaccgtacgatcagctcaagatcattaccgttcacgtgggtaacggcgcatcagttgcggcggtgaagaatggcgtatctgttgacacttccatgggtttcacaccacttgaaggtcttgtcatgggcacgcgcagcggcgatattgatccggccatcgtggaatttcttgagaaagaagaaggattgtcggccaaagaagtcgtcaacatcctcaacaagaaatctggtgtgtatgggctcaccaaaggctttagtagggacatgcgtgacattgtgctgaaggctattgaaggtgatcctgtatgccgccttgcattagatgtgtattattatcgtatcgcgaaatatattggcgcatacgctgcggccatgaacggtgttgacgcgatcgtctttaccgcaggagttggcgaaaatagcccgattatgcgcgaagaaattattgagaactacttgggctacttagggatcaagatcgataaagaagccaatgacttcaaaggtgaggagaagatcatttcaacgcccgattccaaagtgattgcgatggtagttccgaccaacgaggagctcatgatcgccaaagacacgaaagaaatcattgagaaagggttggacgagcttaagatc

SEQ ID NO: 1176 - protein, 417 aa, synthetic construct
  REGION 1..417: note = variant of acetate kinase from Marinitoga sp.38H-ov
MHHHHHHGGSGMKVLVINSGSSSIKYQLLDMTNEKVLAKGLVERIGIDGSRIVHKVNGEGHVLEHEIKNHEIGLKLVLDLLTDEKYGVLKDLKEIDAVGHRVVHGGERFASSVKITDEVLKTIETLSFLAPLHNPANIMGIKSSMKVLPGVPQVAVFDTAFHQKMPEKAYLYAIPYEYYEKYNIRRYGFHGTSHRYVSKRAAEIMGKPYDQLKIITVHVGNGASVAAVKNGVSVDTSMGFTPLEGLVMGTRSGDIDPAIVEFLEKEEGLSAKEVVNILNKKSGVYGLTKGFSRDMRDIVLKAIEGDPVCRLALDVYYYRIAKYIGAYAAAMNGVDAIVFTAGVGENSPIMREEIIENYLGYLGIKIDKEANDFKGEEKIISTPDSKVIAMVVPTNEELMIAKDTKEIIEKGLDELKI

SEQ ID NO: 1177 - DNA, 1251 bp, synthetic construct
  misc_feature 1..1251: note = variant of acetate kinase from Marinitoga sp.38H-ov
  source 1..1251: mol_type = other DNA
atgcaccatcatcatcatcatggcggtagcggcatgaaagttctggtgattaattctggtagctcctccatcaaatatcagctcctcgatatgaccaacgaaaaggtattagcgaaaggcttggtcgagcgcattggcatcgacggttcgcgtatcgtgcataaagttaacggcgaagggcacgtgctggaacatgagattaaaaatcacgaaattggacttaaattggtcctggatcttcttacggacgaaaaatacggtgtgttgaaggatctcaaagaaatcgatgcagttgggcatcgcgtagtacatggcggcgagcgttttgccagtagcgtgaagattactgacgaagtcttaaagaccatcgagacgttgtcgttcttagctccgttacacaatccagcgaacattatgggtatcaagagcagcatgaaagtgttaccgacggtgcctcaagttgccgtctttgatacagcgttccaccagaagatgccggagaaagcctatttgtacgcaatcccctatgagtactacgagaaatataaaattcgccgctatgggtttcatggaacctcacatcgttatgtgagtaaacgtgctgcggaaattatgggcaaaccgtacgatcagctcaagatcattaccgttcacgtgggtaacggcgcatcagttgcggcggtgaagaatggcgtatctgttgacacttccatgggtttcacaccacttgaaggtcttgtcatgggcacgcgcagcggcgatattgatccggccatcgtggaatttcttgagaaagaagaaggattgtcggccaaagaagtcgtcaacatcctcaacaagaaatctggtgtgtatgggctcaccaaaggctttagtagggacatgcgtgacattgtgctgaaggctattgaaggtgatcctgtatgccgccttgcattagatgtgtattattatcgtatcgcgaaatatattggcgcatacgctgcggccatgaacggtgttgacgcgatcgtctttaccgcaggagttggcgaaaatagcccgattatgcgcgaagaaattattgagaactacttgggctacttagggatcaagatcgataaagaagccaatgacttcaaaggtgaggagaagatcatttcaacgcccgattccaaagtgattgcgatggtagttccgaccaacgaggagctcatgatcgccaaagacacgaaagaaatcattgagaaagggttggacgagcttaagatc

SEQ ID NO: 1178 - protein, 417 aa, synthetic construct
  REGION 1..417: note = variant of acetate kinase from Marinitoga sp.38H-ov
MHHHHHHGGSGMKVLVINSGSSSIKYQLLDMTNEKVLAKGLVERIGIDGSRIVHKVNGEGHVLEHEIKNHEIGLKLVLDLLTDEKYGVLKDLKEIDAVGHRVVHGGERFASSVKITDEVLKTIETLSFLAPLHNPANIMGIKSSMKVLPTVPQVAVFDTAFHQKMPEKAYLYAIPYEYYEKYKIRRYGFHGTSHRYVSKRAAEIMGKPYDQLKIITVHVGNGASVAAVKNGVSVDTSMGFTPLEGLVMGTRSGDIDPAIVEFLEKEEGLSAKEVVNILNKKSGVYGLTKGFSRDMRDIVLKAIEGDPVCRLALDVYYYRIAKYIGAYAAAMNGVDAIVFTAGVGENSPIMREEIIENYLGYLGIKIDKEANDFKGEEKIISTPDSKVIAMVVPTNEELMIAKDTKEIIEKGLDELKI

SEQ ID NO: 1179 - DNA, 1251 bp, synthetic construct
  misc_feature 1..1251: note = variant of acetate kinase from Marinitoga sp.38H-ov
  source 1..1251: mol_type = other DNA
atgcaccatcatcatcatcatggcggtagcggcatgaaagttctggtgattaattctggtagctcctccatcaaatatcagctcctcgatatgaccaacgaaaaggtattagcgaaaggcttggtcgagcgcattggcatcgacggttcgcgtatcgtgcataaagttaacggcgaagggcacgtgctggaacatgagattaaaaatcacgaaattggacttaaattggtcctggatcttcttacggacgaaaaatacggtgtgttgaaggatctcaaagaaatcgatgcagttgggcatcgcgtagtacatggcggcgagcgttttgccagtagcgtgaagattactgacgaagtcttaaagaccatcgagacgttgtcgttcttagctccgttacacaatccagcgaacattatgggtatcaagagcagcatgaaagtgttaccgggtgtgcctcaagttgccgtctttgatacagcgttccaccagaagatgccggagaaagcctatttgtacgcaatcccctatgagtactacgagaaatataaaattcgccgctatgggtttcatggaacctcacatcgttatgtgagtaaacgtgctgcggaaattatgggcaaaccgtacgatcagctcaagatcattaccgttcacgtgggtaacggcgcatcagttgcggcggtgaagaatggcgtatctgttgacacttccatgggtttcacaccacttgaaggtcttgtcatgggcacgcgcagcggcgatattgatccggccatcgtggaatttcttgagaaagaagaaggattgacggccaaagaagtcgtcaacatcctcaacaagaaatctggtgtgtatgggctcaccaaaggctttagtagggacatgcgtgacattgtgctgaaggctattgaaggtgatcctgtatgccgccttgcattagatgtgtattattatcgtatcgcgaaatatattggcgcatacgctgcggccatgaacggtgttgacgcgatcgtctttaccgcaggagttggcgaaaatagcccgattatgcgcgaagaaattattgagaactacttgggctacttagggatcaagatcgataaagaagccaatgacttcaaaggtgaggagaagatcatttcaacgcccgattccaaagtgattgcgatggtagttccgaccaacgaggagctcatgatcgccaaagacacgaaagaaatcattgagaaagggttggacgagcttaagatc

SEQ ID NO: 1180 - protein, 417 aa, synthetic construct
  REGION 1..417: note = variant of acetate kinase from Marinitoga sp.38H-ov
MHHHHHHGGSGMKVLVINSGSSSIKYQLLDMTNEKVLAKGLVERIGIDGSRIVHKVNGEGHVLEHEIKNHEIGLKLVLDLLTDEKYGVLKDLKEIDAVGHRVVHGGERFASSVKITDEVLKTIETLSFLAPLHNPANIMGIKSSMKVLPGVPQVAVFDTAFHQKMPEKAYLYAIPYEYYEKYKIRRYGFHGTSHRYVSKRAAEIMGKPYDQLKIITVHVGNGASVAAVKNGVSVDTSMGFTPLEGLVMGTRSGDIDPAIVEFLEKEEGLTAKEVVNILNKKSGVYGLTKGFSRDMRDIVLKAIEGDPVCRLALDVYYYRIAKYIGAYAAAMNGVDAIVFTAGVGENSPIMREEIIENYLGYLGIKIDKEANDFKGEEKIISTPDSKVIAMVVPTNEELMIAKDTKEIIEKGLDELKI

SEQ ID NO: 1181 - DNA, 1251 bp, synthetic construct
  misc_feature 1..1251: note = variant of acetate kinase from Marinitoga sp.38H-ov
  source 1..1251: mol_type = other DNA
atgcaccatcatcatcatcatggcggtagcggcatgaaagttctggtgattaattctggtagctcctccatcaaatatcagctcctcgatatgaccaacgaaaaggtattagcgaaaggcttggtcgagcgcattggcatcgacggttcgcgtatcgtgcataaagttaacggcgaagggcacgtgctggaacatgagattaaaaatcacgaaattggacttaaattggtcctggatcttcttacggacgaaaaatacggtgtgttgaaggatctcaaagaaatcgatgcagttgggcatcgcgtagtacatggcggcgagcgttttgccagtagcgtgaagattactgacgaagtcttaaagaccatcgagacgttgtcgttcttagctccgttacacaatccagcgaacattatgggtatcaagagcagcatgaaagtgttaccgggtgtgcctcaagttgccgtctttgatacagcgttccaccagaagatgccggagaaagcctatttgtacgcaatcccctatgagtactacgagaaatataaaattcgccgctatgggtttcatggaacctcacatcgttatgtgagtaaacgtgctgcggaaattatgggcaaaccgtacgatcagctcaagatcattaccgttcacgtgggtaacggcgcatcagttgcggcggtgaagaatggcgtatctgttgacacttccatgggtttcacaccacttgaaggtcttgtcatgggcacgcgcagcggcgatattgatccggccatcgtggaatttcttgagaaagaagaaggattgtcggccaaatctgtcgtcaacatcctcaacaagaaatctggtgtgtatgggctcaccaaaggctttagtagggacatgcgtgacattgtgctgaaggctattgaaggtgatcctgtatgccgccttgcattagatgtgtattattatcgtatcgcgaaatatattggcgcatacgctgcggccatgaacggtgttgacgcgatcgtctttaccgcaggagttggcgaaaatagcccgattatgcgcgaagaaattattgagaactacttgggctacttagggatcaagatcgataaagaagccaatgacttcaaaggtgaggagaagatcatttcaacgcccgattccaaagtgattgcgatggtagttccgaccaacgaggagctcatgatcgccaaagacacgaaagaaatcattgagaaagggttggacgagcttaagatc

SEQ ID NO: 1182 - protein, 417 aa, synthetic construct
  REGION 1..417: note = variant of acetate kinase from Marinitoga sp.38H-ov
MHHHHHHGGSGMKVLVINSGSSSIKYQLLDMTNEKVLAKGLVERIGIDGSRIVHKVNGEGHVLEHEIKNHEIGLKLVLDLLTDEKYGVLKDLKEIDAVGHRVVHGGERFASSVKITDEVLKTIETLSFLAPLHNPANIMGIKSSMKVLPGVPQVAVFDTAFHQKMPEKAYLYAIPYEYYEKYKIRRYGFHGTSHRYVSKRAAEIMGKPYDQLKIITVHVGNGASVAAVKNGVSVDTSMGFTPLEGLVMGTRSGDIDPAIVEFLEKEEGLSAKSVVNILNKKSGVYGLTKGFSRDMRDIVLKAIEGDPVCRLALDVYYYRIAKYIGAYAAAMNGVDAIVFTAGVGENSPIMREEIIENYLGYLGIKIDKEANDFKGEEKIISTPDSKVIAMVVPTNEELMIAKDTKEIIEKGLDELKI

SEQ ID NO: 1183 - DNA, 1251 bp, synthetic construct
  misc_feature 1..1251: note = variant of acetate kinase from Marinitoga sp.38H-ov
  source 1..1251: mol_type = other DNA
atgcaccatcatcatcatcatggcggtagcggcatgaaagttctggtgattaattctggtagctcctccatcaaatatcagctcctcgatatgaccaacgaaaaggtattagcgaaaggcttggtcgagcgcattggcatcgacggttcgcgtatcgtgcataaagttaacggcgaagggcacgtgctggaacatgagattaaaaatcacgaaattggacttaaattggtcctggatcttcttacggacgaaaaatacggtgtgttgaaggatctcaaagaaatcgatgcagttgggcatcgcgtagtacatggcggcgagcgttttgccagtagcgtgaagattactgacgaagtcttaaagaccatcgagacgttgtcgttcttagctccgttacacaatccagcgaacattatgggtatcaagagcagcatgaaagtgttaccgggtgtgcctcaagttgccgtctttgatacagcgttccaccagaagatgccggagaaagcctatttgtacgcaatcccctatgagtactacaggaaatataaaattcgccgctatgggtttcatggaacctcacatcgttatgtgagtaaacgtgctgcggaaattatgggcaaaccgtacgatcagctcaagatcattaccgttcacgtgggtaacggcgcatcagttgcggcggtgaagaatggcgtatctgttgacacttccatgggtttcacaccacttgaaggtcttgtcatgggcacgcgcagcggcgatattgatccggccatcgtggaatttcttgagaaagaagaaggattgtcggccaaagaagtcgtcaacatcctcaacaagaaatctggtgtgtatgggctcaccaaaggctttagtagggacatgcgtgacattgtgctgaaggctattgaaggtgatcctgtatgccgccttgcattagatgtgtattattatcgtatcgcgaaatatattggcgcatacgctgcggccatgaacggtgttgacgcgatcgtctttaccgcaggagttggcgaaaatagcccgattatgcgcgaagaaattattgagaactacttgggctacttagggatcaagatcgataaagaagccaatgacttcaaaggtgaggagaagatcatttcaacgcccgattccaaagtgattgcgatggtagttccgaccaacgaggagctcatgatcgccaaagacacgaaagaaatcattgagaaagggttggacgagcttaagatc

SEQ ID NO: 1184 - protein, 417 aa, synthetic construct
  REGION 1..417: note = variant of acetate kinase from Marinitoga sp.38H-ov
MHHHHHHGGSGMKVLVINSGSSSIKYQLLDMTNEKVLAKGLVERIGIDGSRIVHKVNGEGHVLEHEIKNHEIGLKLVLDLLTDEKYGVLKDLKEIDAVGHRVVHGGERFASSVKITDEVLKTIETLSFLAPLHNPANIMGIKSSMKVLPGVPQVAVFDTAFHQKMPEKAYLYAIPYEYYRKYKIRRYGFHGTSHRYVSKRAAEIMGKPYDQLKIITVHVGNGASVAAVKNGVSVDTSMGFTPLEGLVMGTRSGDIDPAIVEFLEKEEGLSAKEVVNILNKKSGVYGLTKGFSRDMRDIVLKAIEGDPVCRLALDVYYYRIAKYIGAYAAAMNGVDAIVFTAGVGENSPIMREEIIENYLGYLGIKIDKEANDFKGEEKIISTPDSKVIAMVVPTNEELMIAKDTKEIIEKGLDELKI

SEQ ID NO: 1185 - DNA, 1251 bp, synthetic construct
  misc_feature 1..1251: note = variant of acetate kinase from Marinitoga sp.38H-ov
  source 1..1251: mol_type = other DNA
atgcaccatcatcatcatcatggcggtagcggcatgaaagttctggtgattaattctggtagctcctccatcaaatatcagctcctcgatatgaccaacgaaaaggtattagcgaaaggcttggtcgagcgcattggcatcgacggttcgcgtatcgtgcataaagttaacggcgaagggcacgtgctggaacatgagattaaaaatcacgaaattggacttaaattggtcctggatcttcttacggacgaaaaatacggtgtgttgaaggatctcaaagaaatcgatgcagttgggcatcgcgtagtacatggcggcgagcgttttgccagtagcgtgaagattactgacgaagtcttaaagaccatcgagacgttgtcgttcttagctccgttacacaatccagcgaacattatgggtatcaagagcagcatgaaagtgttaccgggtgtgcctcaagttgccgtctttgatacagcgttccaccagaagatgccggagaaagcctatttgtacgcaatcccctatgagtactacgagaaatataaaattcgccgctatgggtttcatggaacctcacatcgttatgtgagtaaacgtgctgcggaaattatgggcaaaccgtaccctcagctcaagatcattaccgttcacgtgggtaacggcgcatcagttgcggcggtgaagaatggcgtatctgttgacacttccatgggtttcacaccacttgaaggtcttgtcatgggcacgcgcagcggcgatattgatccggccatcgtggaatttcttgagaaagaagaaggattgtcggccaaagaagtcgtcaacatcctcaacaagaaatctggtgtgtatgggctcaccaaaggctttagtagggacatgcgtgacattgtgctgaaggctattgaaggtgatcctgtatgccgccttgcattagatgtgtattattatcgtatcgcgaaatatattggcgcatacgctgcggccatgaacggtgttgacgcgatcgtctttaccgcaggagttggcgaaaatagcccgattatgcgcgaagaaattattgagaactacttgggctacttagggatcaagatcgataaagaagccaatgacttcaaaggtgaggagaagatcatttcaacgcccgattccaaagtgattgcgatggtagttccgaccaacgaggagctcatgatcgccaaagacacgaaagaaatcattgagaaagggttggacgagcttaagatc

SEQ ID NO: 1186 - protein, 417 aa, synthetic construct
  REGION 1..417: note = variant of acetate kinase from Marinitoga sp.38H-ov
MHHHHHHGGSGMKVLVINSGSSSIKYQLLDMTNEKVLAKGLVERIGIDGSRIVHKVNGEGHVLEHEIKNHEIGLKLVLDLLTDEKYGVLKDLKEIDAVGHRVVHGGERFASSVKITDEVLKTIETLSFLAPLHNPANIMGIKSSMKVLPGVPQVAVFDTAFHQKMPEKAYLYAIPYEYYEKYKIRRYGFHGTSHRYVSKRAAEIMGKPYPQLKIITVHVGNGASVAAVKNGVSVDTSMGFTPLEGLVMGTRSGDIDPAIVEFLEKEEGLSAKEVVNILNKKSGVYGLTKGFSRDMRDIVLKAIEGDPVCRLALDVYYYRIAKYIGAYAAAMNGVDAIVFTAGVGENSPIMREEIIENYLGYLGIKIDKEANDFKGEEKIISTPDSKVIAMVVPTNEELMIAKDTKEIIEKGLDELKI

SEQ ID NO: 1187 - DNA, 1251 bp, synthetic construct
  misc_feature 1..1251: note = variant of acetate kinase from Marinitoga sp.38H-ov
  source 1..1251: mol_type = other DNA
atgcaccatcatcatcatcatggcggtagcggcatgaaagttctggtgattaattctggtagctcctccatcaaatatcagctcctcgatatgaccaacgaaaaggtattagcgaaaggcttggtcgagcgcattggcatcgacgcttcgcgtatcgtggcgaaagttaacggcgaagggcacgtgctggaacatgagattaaaaatcacgaaattggacttaaattggtcctggatcttcttacggacgaaaaatacggtgtgttgaaggatctcaaagaaatcgatgcagttgggcatcgcgtagtacatggcggcgagcgttttgccagtagcgtgaagattactgacgaagtcttaaagaccatcgagacgttgtcgttcttagctccgttacacaatccagcgaacattatgggtatcaagagcagcatgaaagtgttaccgggtgtgcctcaagttgccgtctttgatacagcgttccaccagaagatgccggagaaagcctatttgtacgcaatcccctatgagtactacgagaaatataaaattcgccgctatgggtttcatggaacctcacatcgttatgtgagtaaacgtgctgcggaaattatgggcaaaccgtacgatcagctcaagatcattaccgttcacgtgggtaacggcgcatcagttgcggcggtgaagaatggcgtatctgttgacacttccatgggtttcacaccacttgaaggtcttgtcatgggcacgcgcagcggcgatattgatccggccatcgtggaatttcttgagaaagaagaaggattgtcggccaaagaagtcgtcaacatcctcaacaagaaatctggtgtgtatgggctcaccaaaggctttagtagggacatgcgtgacattgtgctgaaggctattgaaggtgatcctgtatgccgccttgcattagatgtgtattattatcgtatcgcgaaatatattggcgcatacgctgcggccatgaacggtgttgacgcgatcgtctttaccgcaggagttggcgaaaatagcccgattatgcgcgaagaaattattgagaactacttgggctacttagggatcaagatcgataaagaagccaatgacttcaaaggtgaggagaagatcatttcaacgcccgattccaaagtgattgcgatggtagttccgaccaacgaggagctcatgatcgccaaagacacgaaagaaatcattgagaaagggttggacgagcttaagatc

SEQ ID NO: 1188 - protein, 417 aa, synthetic construct
  REGION 1..417: note = variant of acetate kinase from Marinitoga sp.38H-ov
MHHHHHHGGSGMKVLVINSGSSSIKYQLLDMTNEKVLAKGLVERIGIDASRIVAKVNGEGHVLEHEIKNHEIGLKLVLDLLTDEKYGVLKDLKEIDAVGHRVVHGGERFASSVKITDEVLKTIETLSFLAPLHNPANIMGIKSSMKVLPGVPQVAVFDTAFHQKMPEKAYLYAIPYEYYEKYKIRRYGFHGTSHRYVSKRAAEIMGKPYDQLKIITVHVGNGASVAAVKNGVSVDTSMGFTPLEGLVMGTRSGDIDPAIVEFLEKEEGLSAKEVVNILNKKSGVYGLTKGFSRDMRDIVLKAIEGDPVCRLALDVYYYRIAKYIGAYAAAMNGVDAIVFTAGVGENSPIMREEIIENYLGYLGIKIDKEANDFKGEEKIISTPDSKVIAMVVPTNEELMIAKDTKEIIEKGLDELKI

SEQ ID NO: 1189 - DNA, 1251 bp, synthetic construct
  misc_feature 1..1251: note = variant of acetate kinase from Marinitoga sp.38H-ov
  source 1..1251: mol_type = other DNA
atgcaccatcatcatcatcatggcggtagcggcatgaaagttctggtgattaattctggtagctcctccatcaaatatcagctcctcgatatgaccaacgaaaaggtattagcgaaaggcttggtcgagcgcattggcatcgacggttcgcgtatcgtgcataaagttaacggcgaagggcacgtgctggaacatgagattaaaaatcacgaaattggacttaaattggtcctggatcttcttacggacgaaaaatacggtgtgttgaaggatctcaaagaaatcgatgcagttgggcatcgcgtagtacatggcggcgagcgttttgccagtagcgtgaagattactgacgaagtcttaaagaccatcgagacgttgtcgttcttagctccgttacacaatccagcgaacattatgggtatcaagagcagcatgaaagtgttaccgggtgtgcctcaagttgccgtctttgatacagcgttccaccagaagatgccggagaaagcctatttgtacgcaatccccgtggagtactacgagaaatataaaattcgccgctatgggtttcatggaacctcacatcgttatgtgagtaaacgtgctgcggaaattatgggcaaaccgtacgatcagctcaagatcattaccgttcacgtgggtaacggcgcatcagttgcggcggtgaagaatggcgtatctgttgacacttccatgggtttcacaccacttgaaggtcttgtcatgggcacgcgcagcggcgatattgatccggccatcgtggaatttcttgagaaagaagaaggattgtcggccaaagaagtcgtcaacatcctcaacaagaaatctggtgtgtatgggctcaccaaaggctttagtagggacatgcgtgacattgtgctgaaggctattgaaggtgatcctgtatgccgccttgcattagatgtgtattattatcgtatcgcgaaatatattggcgcatacgctgcggccatgaacggtgttgacgcgatcgtctttaccgcaggagttggcgaaaatagcccgattatgcgcgaagaaattattgagaactacttgggctacttagggatcaagatcgataaagaagccaatgacttcaaaggtgaggagaagatcatttcaacgcccgattccaaagtgattgcgatggtagttccgaccaacgaggagctcatgatcgccaaagacacgaaagaaatcattgagaaagggttggacgagcttaagatc

SEQ ID NO: 1190 - protein, 417 aa, synthetic construct
  REGION 1..417: note = variant of acetate kinase from Marinitoga sp.38H-ov
MHHHHHHGGSGMKVLVINSGSSSIKYQLLDMTNEKVLAKGLVERIGIDGSRIVHKVNGEGHVLEHEIKNHEIGLKLVLDLLTDEKYGVLKDLKEIDAVGHRVVHGGERFASSVKITDEVLKTIETLSFLAPLHNPANIMGIKSSMKVLPGVPQVAVFDTAFHQKMPEKAYLYAIPVEYYEKYKIRRYGFHGTSHRYVSKRAAEIMGKPYDQLKIITVHVGNGASVAAVKNGVSVDTSMGFTPLEGLVMGTRSGDIDPAIVEFLEKEEGLSAKEVVNILNKKSGVYGLTKGFSRDMRDIVLKAIEGDPVCRLALDVYYYRIAKYIGAYAAAMNGVDAIVFTAGVGENSPIMREEIIENYLGYLGIKIDKEANDFKGEEKIISTPDSKVIAMVVPTNEELMIAKDTKEIIEKGLDELKI

SEQ ID NO: 1191 - DNA, 1251 bp, synthetic construct
  misc_feature 1..1251: note = variant of acetate kinase from Marinitoga sp.38H-ov
  source 1..1251: mol_type = other DNA
atgcaccatcatcatcatcatggcggtagcggcatgaaagttctggtgattaattctggtagctcctccatcaaatatcagctcctcgatatgaccaacgaaaaggtattagcgaaaggcttggtcgagcgcattggcatcgacggttcgcgtatcgtgcataaagttaacggcgaagggcacgtgctggaacatgagattaaaaatcacgaaattggacttaaattggtcctggatcttcttacggacgaaaaatacggtgtgttgaaggatctcaaagaaatcgatgcagttgggcatcgcgtagtacatggcggcgagcgttttgccagtagcgtgaagattactgacgaagtcttaaagaccatcgagacgttgtcgttcttagctccgttacacaatccagcgaacattatgggtatcaagagcagcatgaaagtgttaccgggtgtgcctcaagttgccgtctttgatacagcgttccaccagaagatgccggagaaagcctatttgtacgcaatcccctatgagtactacgagaaatataaaattcgccgctatgggtttcatggaacctcacatcgttatgtgagtaaacgtgctgcggaaattatgggcaaaccgtacgatcagctcaagatcattaccgttcacgtgggtaacggcgcatcagttgcggcggtgaagaatggcgtatctgttgacacttccatgggtttcacaccacttgaaggtcttgtcatgggcacgcgcagcggcgatattgatccggccatcgtggaatttcttgagaaagaagaaggattgtcggccaaagaagtcgtcaacatcctcaacaagaaatctggtgtgtatgggctcaccaaaggctttagtagggacatgcgtgacattgtgctgaaggctattgaaggtgatcctgtatgccgccttgcattagatgtgtattattatcgtatcgcgaaatatattggcgcatacgctgcggccatgaacggtgttgacgcgatcgtctttaccgcaggagttggcgaaaatagcccgattatgcgcgaagaaattattgagaactacttgggctacttagggatcaagatcgataaagaagccaatgacttcaaaggtgaggagaagatcatttcaacgcccgattccaaagtgattgcgatggtagttccgaccaacgaggagctcatgatcgccaaagacacgaaattgatcattgagaaagggttggacgagcttaagatc

SEQ ID NO: 1192 - protein, 417 aa, synthetic construct
  REGION 1..417: note = variant of acetate kinase from Marinitoga sp.38H-ov
MHHHHHHGGSGMKVLVINSGSSSIKYQLLDMTNEKVLAKGLVERIGIDGSRIVHKVNGEGHVLEHEIKNHEIGLKLVLDLLTDEKYGVLKDLKEIDAVGHRVVHGGERFASSVKITDEVLKTIETLSFLAPLHNPANIMGIKSSMKVLPGVPQVAVFDTAFHQKMPEKAYLYAIPYEYYEKYKIRRYGFHGTSHRYVSKRAAEIMGKPYDQLKIITVHVGNGASVAAVKNGVSVDTSMGFTPLEGLVMGTRSGDIDPAIVEFLEKEEGLSAKEVVNILNKKSGVYGLTKGFSRDMRDIVLKAIEGDPVCRLALDVYYYRIAKYIGAYAAAMNGVDAIVFTAGVGENSPIMREEIIENYLGYLGIKIDKEANDFKGEEKIISTPDSKVIAMVVPTNEELMIAKDTKLIIEKGLDELKI

SEQ ID NO: 1193 - DNA, 1251 bp, synthetic construct
  misc_feature 1..1251: note = variant of acetate kinase from Marinitoga sp.38H-ov
  source 1..1251: mol_type = other DNA
atgcaccatcatcatcatcatggcggtagcggcatgaaagttctggtgattaattctggtagctcctccatcaaatatcagctcctcgatatgaccaacgaaaaggtattagcgaaaggcttggtcgagcgcattggcatcgacggttcgcgtatcgtgcataaagttaacggcgaagggcacgtgctggaacatgagattaaaaatcacgaaattggacttaaattggtcctggatcttcttacggacgaaaaatacggtgtgttgaaggatctcaaagaaatcgatgcagttgggcatcgcgtagtacatggcggcgagcgttttgccagtagcgtgaagattactgacgaagtcttaaagaccatcgagacgttgtcgttcttagctccgttacacaatccagcgaacattatgggtatcaagagcagcatgaaagtgttaccgggtgtgcctcaagttgccgtctttgatacagcgttccaccagaagatgccggagaaagcctatttgtacgcaatcccctatgagtactacgagaaatataaaattcgccgctatgggtttcatggaacctcacatcgttatgtgagtaaacgtgctgcggaaattatgggcaaaccgtacgatcagctcaagatcattaccgttcacgtgggtaacggcgcatcagttgcggcggtgaagaatggcgtatctgttgacacttccatgggtttcacaccacttgaaggtcttgtcatgggcacgcgcagcggcgatattgatccggccatctttgaatttcttgagaaagaagaaggattgtcggccaaagaagtcgtcaacatcctcaacaagaaatctggtgtgtatgggctcaccaaaggctttagtagggacatgcgtgacattgtgctgaaggctattgaaggtgatcctgtatgccgccttgcattagatgtgtattattatcgtatcgcgaaatatattggcgcatacgctgcggccatgaacggtgttgacgcgatcgtctttaccgcaggagttggcgaaaatagcccgattatgcgcgaagaaattattgagaactacttgggctacttagggatcaagatcgataaagaagccaatgacttcaaaggtgaggagaagatcatttcaacgcccgattccaaagtgattgcgatggtagttccgaccaacgaggagctcatgatcgccaaagacacgaaagaaatcattgagaaagggttggacgagcttaagatc

SEQ ID NO: 1194 - protein, 417 aa, synthetic construct
  REGION 1..417: note = variant of acetate kinase from Marinitoga sp.38H-ov
MHHHHHHGGSGMKVLVINSGSSSIKYQLLDMTNEKVLAKGLVERIGIDGSRIVHKVNGEGHVLEHEIKNHEIGLKLVLDLLTDEKYGVLKDLKEIDAVGHRVVHGGERFASSVKITDEVLKTIETLSFLAPLHNPANIMGIKSSMKVLPGVPQVAVFDTAFHQKMPEKAYLYAIPYEYYEKYKIRRYGFHGTSHRYVSKRAAEIMGKPYDQLKIITVHVGNGASVAAVKNGVSVDTSMGFTPLEGLVMGTRSGDIDPAIFEFLEKEEGLSAKEVVNILNKKSGVYGLTKGFSRDMRDIVLKAIEGDPVCRLALDVYYYRIAKYIGAYAAAMNGVDAIVFTAGVGENSPIMREEIIENYLGYLGIKIDKEANDFKGEEKIISTPDSKVIAMVVPTNEELMIAKDTKEIIEKGLDELKI

SEQ ID NO: 1195 - DNA, 1251 bp, synthetic construct
  misc_feature 1..1251: note = variant of acetate kinase from Marinitoga sp.38H-ov
  source 1..1251: mol_type = other DNA
atgcaccatcatcatcatcatggcggtagcggcatgaaagttctggtgattaattctggtagctcctccatcaaatatcagctcctcgatatgaccaacgaaaaggtattagcgaaaggcttggtcgagcgcattggcatcgacggttcgcgtatcgtgcataaagttaacggcgaagggcacgtgctggaacatgagattaaaaatcacgaaattggacttaaattggtcctggatcttcttacggacgaaaaatacggtgtgttgaaggatctcaaagaaatcgatgcagttgggcatcgcgtagtacatggcggcgagcgttttgccagtagcgtgaagattactgacgaagtcttaaagaccatcgagacgttgtcgttcttagctccgttacacaatccagcgaacattatgggtatcaagagcagcatgaaagtgttaccgggtgtgcctcaagttgccgtctttgatacagcgttccaccagaagatgccggagaaagcctatttgtacgcaatcccctatgagtactacgagaaatataaaattcgccgctatgggtttcatggaacctcacatcgttatgtgagtaaacgtgctgcggaaattatgggcaaaccgtacgatcagctcaagatcattaccgttcacgtgggtaacggcgcatcagttgcggcggtgaagaatggcgtatctgttgacacttccatgggtttcacaccacttgaaggtcttgtcatgggcacgcgcagcggcgatattgatccggccatcgtggaatttcttgagaaagaagaaggattgtcggccaaagaagtcgtcaacatcctcaacaagaaatctggtgtgtatgggctcaccaaaggctttagtagggacatgcgtgacattgtgctgaaggctattgaaggtgatcctgtatgccgccttgcattagatgtgtattattatcgtatcgcgaaatatattggcgcatacgctgcggccatgaacggtgttgacgcgatcgtctttaccgcaggagttggcgaaaatagcccgattatgcgcgaagaaattattgagaactacttgggctacttagggatcaagatcgataaagaagccaatgacttcaaaggtgaggagaagatcatttcaacgcccgattccaaagtgattgcgatggtagttccgaccaacgaggagctcatgatcgccaaagacacgaaaattatcattgagaaagggttggacgagcttaagatc

SEQ ID NO: 1196 - protein, 417 aa, synthetic construct
  REGION 1..417: note = variant of acetate kinase from Marinitoga sp.38H-ov
MHHHHHHGGSGMKVLVINSGSSSIKYQLLDMTNEKVLAKGLVERIGIDGSRIVHKVNGEGHVLEHEIKNHEIGLKLVLDLLTDEKYGVLKDLKEIDAVGHRVVHGGERFASSVKITDEVLKTIETLSFLAPLHNPANIMGIKSSMKVLPGVPQVAVFDTAFHQKMPEKAYLYAIPYEYYEKYKIRRYGFHGTSHRYVSKRAAEIMGKPYDQLKIITVHVGNGASVAAVKNGVSVDTSMGFTPLEGLVMGTRSGDIDPAIVEFLEKEEGLSAKEVVNILNKKSGVYGLTKGFSRDMRDIVLKAIEGDPVCRLALDVYYYRIAKYIGAYAAAMNGVDAIVFTAGVGENSPIMREEIIENYLGYLGIKIDKEANDFKGEEKIISTPDSKVIAMVVPTNEELMIAKDTKIIIEKGLDELKI

SEQ ID NO: 1197 - DNA, 1251 bp, synthetic construct
  misc_feature 1..1251: note = variant of acetate kinase from Marinitoga sp.38H-ov
  source 1..1251: mol_type = other DNA
atgcaccatcatcatcatcatggcggtagcggcatgaaagttctggtgattaattctggtagctcctccatcaaatatcagctcctcgatatgaccaacgaaaaggtattagcgaaaggcttggtcgagcgcattggcatcgacggttcgcgtatcgtgcataaagttaacggcgaagggcacgtgctggaacatgagattaaaaatcacgaaattggacttaaattggtcctggatcttcttacggacgaaaaatacggtgtgttgaaggatctcaaagaaatcgatgcagttgggcatcgcgtagtacatggcggcgagcgttttgccagtagcgtgaagattactgacgaagtcttaaagaccatcgagacgttgtcgttcttagctccgttacacaatccagcgaacattatgggtatcaagagcagcatgaaagtgttaccgggtgtgcctcaagttgccgtctttgatacagcgttccaccagaagatgccgggtaaagcctatttgtacgcaatcccctatgagtactacgagaaatataaaattcgccgctatgggtttcatggaacctcacatcgttatgtgagtaaacgtgctgcggaaattatgggcaaaccgtacgatcagctcaagatcattaccgttcacgtgggtaacggcgcatcagttgcggcggtgaagaatggcgtatctgttgacacttccatgggtttcacaccacttgaaggtcttgtcatgggcacgcgcagcggcgatattgatccggccatcgtggaatttcttgagaaagaagaaggattgtcggccaaagaagtcgtcaacatcctcaacaagaaatctggtgtgtatgggctcaccaaaggctttagtagggacatgcgtgacattgtgctgaaggctattgaaggtgatcctgtatgccgccttgcattagatgtgtattattatcgtatcgcgaaatatattggcgcatacgctgcggccatgaacggtgttgacgcgatcgtctttaccgcaggagttggcgaaaatagcccgattatgcgcgaagaaattattgagaactacttgggctacttagggatcaagatcgataaagaagccaatgacttcaaaggtgaggagaagatcatttcaacgcccgattccaaagtgattgcgatggtagttccgaccaacgaggagctcatgatcgccaaagacacgaaagaaatcattgagaaagggttggacgagcttaagatc

SEQ ID NO: 1198 - protein, 417 aa, synthetic construct
  REGION 1..417: note = variant of acetate kinase from Marinitoga sp.38H-ov
MHHHHHHGGSGMKVLVINSGSSSIKYQLLDMTNEKVLAKGLVERIGIDGSRIVHKVNGEGHVLEHEIKNHEIGLKLVLDLLTDEKYGVLKDLKEIDAVGHRVVHGGERFASSVKITDEVLKTIETLSFLAPLHNPANIMGIKSSMKVLPGVPQVAVFDTAFHQKMPGKAYLYAIPYEYYEKYKIRRYGFHGTSHRYVSKRAAEIMGKPYDQLKIITVHVGNGASVAAVKNGVSVDTSMGFTPLEGLVMGTRSGDIDPAIVEFLEKEEGLSAKEVVNILNKKSGVYGLTKGFSRDMRDIVLKAIEGDPVCRLALDVYYYRIAKYIGAYAAAMNGVDAIVFTAGVGENSPIMREEIIENYLGYLGIKIDKEANDFKGEEKIISTPDSKVIAMVVPTNEELMIAKDTKEIIEKGLDELKI

SEQ ID NO: 1199 - DNA, 1251 bp, synthetic construct
  misc_feature 1..1251: note = variant of acetate kinase from Marinitoga sp.38H-ov
  source 1..1251: mol_type = other DNA
atgcaccatcatcatcatcatggcggtagcggcatgaaagttctggtgattaattctggtagctcctccatcaaatatcagctcctcgatatgaccaacgaaaaggtattagcgaaaggcttggtcgagcgcattggcatcgacggttcgcgtatcgtgcataaagttaacggcgaagggcacgtgctggaacatgagattaaaaatcacgaaattggacttaaattggtcctggatcttcttacggacgaaaaatacggtgtgttgaaggatctcaaagaaatcgatgcagttgggcatcgcgtagtacatggcggcgagcgttttgccagtagcgtgaagattactgacgaagtcttaaagaccatcgagacgttgtcgttcttagctccgttacacaatccagcgaacattatgggtatcaagagcagcatgaaagtgttaccgggtgtgcctcaagttgccgtctttgatacagcgttccaccagaagatgccggagaaagcctatttgtacgcaatcccctatgagtactacgagaaatataaaattcgccgctatgggtttcatggaacctcacatcgttatgtgagtaaacgtgctgcggaaattatgggcaaaccgtacgatatgctcaagatcattaccgttcacgtgggtaacggcgcatcagttgcggcggtgaagaatggcgtatctgttgacacttccatgggtttcacaccacttgaaggtcttgtcatgggcacgcgcagcggcgatattgatccggccatcgtggaatttcttgagaaagaagaaggattgtcggccaaagaagtcgtcaacatcctcaacaagaaatctggtgtgtatgggctcaccaaaggctttagtagggacatgcgtgacattgtgctgaaggctattgaaggtgatcctgtatgccgccttgcattagatgtgtattattatcgtatcgcgaaatatattggcgcatacgctgcggccatgaacggtgttgacgcgatcgtctttaccgcaggagttggcgaaaatagcccgattatgcgcgaagaaattattgagaactacttgggctacttagggatcaagatcgataaagaagccaatgacttcaaaggtgaggagaagatcatttcaacgcccgattccaaagtgattgcgatggtagttccgaccaacgaggagctcatgatcgccaaagacacgaaagaaatcattgagaaagggttggacgagcttaagatc

SEQ ID NO: 1200 - protein, 417 aa, synthetic construct
  REGION 1..417: note = variant of acetate kinase from Marinitoga sp.38H-ov
MHHHHHHGGSGMKVLVINSGSSSIKYQLLDMTNEKVLAKGLVERIGIDGSRIVHKVNGEGHVLEHEIKNHEIGLKLVLDLLTDEKYGVLKDLKEIDAVGHRVVHGGERFASSVKITDEVLKTIETLSFLAPLHNPANIMGIKSSMKVLPGVPQVAVFDTAFHQKMPEKAYLYAIPYEYYEKYKIRRYGFHGTSHRYVSKRAAEIMGKPYDMLKIITVHVGNGASVAAVKNGVSVDTSMGFTPLEGLVMGTRSGDIDPAIVEFLEKEEGLSAKEVVNILNKKSGVYGLTKGFSRDMRDIVLKAIEGDPVCRLALDVYYYRIAKYIGAYAAAMNGVDAIVFTAGVGENSPIMREEIIENYLGYLGIKIDKEANDFKGEEKIISTPDSKVIAMVVPTNEELMIAKDTKEIIEKGLDELKI

SEQ ID NO: 1201 - DNA, 1251 bp, synthetic construct
  misc_feature 1..1251: note = variant of acetate kinase from Marinitoga sp.38H-ov
  source 1..1251: mol_type = other DNA
atgcaccatcatcatcatcatggcggtagcggcatgaaagttctggtgattaattctggtagctcctccatcaaatatcagctcctcgatatgaccaacgaaaaggtattagcgaaaggcttggtcgagcgcattggcatcgacggttcgcgtatcgtgcataaagttaacggcgaagggcacgtgctggaacatgagattaaaaatcacgaaattggacttaaattggtcctggatcttcttacggacgaaaaatacggtgtgttgaaggatctcaaagaaatcgatgcagttgggcatcgcgtagtacatggcggcgagcgttttgccagtagcgtgaagattactgacgaagtcttaaagaccatcgagacgttgtcgttcttagctccgttacacaatccagcgaacattatgggtatcaagagcagcatgaaagtgttaccgggtgtgcctcaagttgccgtctttgatacagcgttccaccagaagatgccggagaaagcctatttgtacgcaatcccctatgagtactacgagaaatataaaattcgccgctatgggtttcatggaacctcacatcgttatgtgagtaaacgtcaggcggaaattatgggcaaaccgtacgatcagctcaagatcattaccgttcacgtgggtaacggcgcatcagttgcggcggtgaagaatggcgtatctgttgacacttccatgggtttcacaccacttgaaggtcttgtcatgggcacgcgcagcggcgatattgatccggccatcgtggaatttcttgagaaagaagaaggattgtcggccaaagaagtcgtcaacatcctcaacaagaaatctggtgtgtatgggctcaccaaaggctttagtagggacatgcgtgacattgtgctgaaggctattgaaggtgatcctgtatgccgccttgcattagatgtgtattattatcgtatcgcgaaatatattggcgcatacgctgcggccatgaacggtgttgacgcgatcgtctttaccgcaggagttggcgaaaatagcccgattatgcgcgaagaaattattgagaactacttgggctacttagggatcaagatcgataaagaagccaatgacttcaaaggtgaggagaagatcatttcaacgcccgattccaaagtgattgcgatggtagttccgaccaacgaggagctcatgatcgccaaagacacgaaagaaatcattgagaaagggttggacgagcttaagatc

SEQ ID NO: 1202 - protein, 417 aa, synthetic construct
  REGION 1..417: note = variant of acetate kinase from Marinitoga sp.38H-ov
MHHHHHHGGSGMKVLVINSGSSSIKYQLLDMTNEKVLAKGLVERIGIDGSRIVHKVNGEGHVLEHEIKNHEIGLKLVLDLLTDEKYGVLKDLKEIDAVGHRVVHGGERFASSVKITDEVLKTIETLSFLAPLHNPANIMGIKSSMKVLPGVPQVAVFDTAFHQKMPEKAYLYAIPYEYYEKYKIRRYGFHGTSHRYVSKRQAEIMGKPYDQLKIITVHVGNGASVAAVKNGVSVDTSMGFTPLEGLVMGTRSGDIDPAIVEFLEKEEGLSAKEVVNILNKKSGVYGLTKGFSRDMRDIVLKAIEGDPVCRLALDVYYYRIAKYIGAYAAAMNGVDAIVFTAGVGENSPIMREEIIENYLGYLGIKIDKEANDFKGEEKIISTPDSKVIAMVVPTNEELMIAKDTKEIIEKGLDELKI

SEQ ID NO: 1203 - DNA, 1251 bp, synthetic construct
  misc_feature 1..1251: note = variant of acetate kinase from Marinitoga sp.38H-ov
  source 1..1251: mol_type = other DNA
atgcaccatcatcatcatcatggcggtagcggcatgaaagttctggtgattaattctggtagctcctccatcaaatatcagctcctcgatatgaccaacgaaaaggtattagcgaaaggcttggtcgagcgcattggcatcgacggttcgcgtatcgtgcataaagttaacggcgaagggcacgtgctggaacatgagattaaaaatcacgaaattggacttaaattggtcctggatcttcttacggacgaaaaatacggtgtgttgaaggatctcaaagaaatcgatgcagttgggcatcgcgtagtacatggcggcgagcgttttgccagtagcgtgaagattactgacgaagtcttaaagaccatcgagacgttgtcgttcttagctccgttacacaatccagcgaacattatgggtatcaagagcagcatgaaagtgttaccgggtgtgcctcaagttgccgtctttgatacagcgttccaccagaagatgccggagaaagcctatttgtacgcaatcccctatgagtactacgagaaatataaaattcgccgctatgggtttcatggaacctcacatcgttatgtgagtaaacgtgctgcggaaattatgggcaaaccgtacgatcagctcaagatcattaccgttcacgtgggtaacggcgcatcagttgcggcggtgagtaatggcgtatctgttgacacttccatgggtttcacaccacttgaaggtcttgtcatgggcacgcgcagcggcgatattgatccggccatcgtggaatttcttgagaaagaagaaggattgtcggccaaagaagtcgtcaacatcctcaacaagaaatctggtgtgtatgggctcaccaaaggctttagtagggacatgcgtgacattgtgctgaaggctattgaaggtgatcctgtatgccgccttgcattagatgtgtattattatcgtatcgcgaaatatattggcgcatacgctgcggccatgaacggtgttgacgcgatcgtctttaccgcaggagttggcgaaaatagcccgattatgcgcgaagaaattattgagaactacttgggctacttagggatcaagatcgataaagaagccaatgacttcaaaggtgaggagaagatcatttcaacgcccgattccaaagtgattgcgatggtagttccgaccaacgaggagctcatgatcgccaaagacacgaaagaaatcattgagaaagggttggacgagcttaagatc

SEQ ID NO: 1204 - protein, 417 aa, synthetic construct
  REGION 1..417: note = variant of acetate kinase from Marinitoga sp.38H-ov
MHHHHHHGGSGMKVLVINSGSSSIKYQLLDMTNEKVLAKGLVERIGIDGSRIVHKVNGEGHVLEHEIKNHEIGLKLVLDLLTDEKYGVLKDLKEIDAVGHRVVHGGERFASSVKITDEVLKTIETLSFLAPLHNPANIMGIKSSMKVLPGVPQVAVFDTAFHQKMPEKAYLYAIPYEYYEKYKIRRYGFHGTSHRYVSKRAAEIMGKPYDQLKIITVHVGNGASVAAVSNGVSVDTSMGFTPLEGLVMGTRSGDIDPAIVEFLEKEEGLSAKEVVNILNKKSGVYGLTKGFSRDMRDIVLKAIEGDPVCRLALDVYYYRIAKYIGAYAAAMNGVDAIVFTAGVGENSPIMREEIIENYLGYLGIKIDKEANDFKGEEKIISTPDSKVIAMVVPTNEELMIAKDTKEIIEKGLDELKI

SEQ ID NO: 1205 - DNA, 1251 bp, synthetic construct
  misc_feature 1..1251: note = variant of acetate kinase from Marinitoga sp.38H-ov
  source 1..1251: mol_type = other DNA
atgcaccatcatcatcatcatggcggtagcggcatgaaagttctggtgattaattctggtagctcctccatcaaatatcagctcctcgatatgaccaacgaaaaggtattagcgaaaggcttggtcgagcgcattggcatcgacggttcgcgtatcgtgcataaagttaacggcgaagggcacgtgctggaacatgagattaaaaatcacgaaattggacttaaattggtcctggatcttcttacggacgaaaaatacggtgtgttgaaggatctcaaagaaatcgatgcagttgggcatcgcgtagtacatggcggcgagcgttttgccagtagcgtgaagattactgacgaagtcttaaagaccatcgagacgttgtcgttcttagctccgttacacaatccagcgaacattatgggtatcaagagcagcatgaaagtgttaccgggtgtgcctcaagttgccgtctttgatacagcgttccaccagaagatgccggagaaagcctatttgtacgcaatcccctatgagtactacgagaaatataaaattcgccgctatgggtttcatggaacctcacatcgttatgtgagtaaacgtgctgcggaaattatgggcaaaccgtacgatcagctcaagatcattaccgttcacgtgggtaacggcgcatcagttgcggcggtgcttaatggcgtatctgttgacacttccatgggtttcacaccacttgaaggtcttgtcatgggcacgcgcagcggcgatattgatccggccatcgtggaatttcttgagaaagaagaaggattgtcggccaaagaagtcgtcaacatcctcaacaagaaatctggtgtgtatgggctcaccaaaggctttagtagggacatgcgtgacattgtgctgaaggctattgaaggtgatcctgtatgccgccttgcattagatgtgtattattatcgtatcgcgaaatatattggcgcatacgctgcggccatgaacggtgttgacgcgatcgtctttaccgcaggagttggcgaaaatagcccgattatgcgcgaagaaattattgagaactacttgggctacttagggatcaagatcgataaagaagccaatgacttcaaaggtgaggagaagatcatttcaacgcccgattccaaagtgattgcgatggtagttccgaccaacgaggagctcatgatcgccaaagacacgaaagaaatcattgagaaagggttggacgagcttaagatc

SEQ ID NO: 1206 - protein, 417 aa, synthetic construct
  REGION 1..417: note = variant of acetate kinase from Marinitoga sp.38H-ov
MHHHHHHGGSGMKVLVINSGSSSIKYQLLDMTNEKVLAKGLVERIGIDGSRIVHKVNGEGHVLEHEIKNHEIGLKLVLDLLTDEKYGVLKDLKEIDAVGHRVVHGGERFASSVKITDEVLKTIETLSFLAPLHNPANIMGIKSSMKVLPGVPQVAVFDTAFHQKMPEKAYLYAIPYEYYEKYKIRRYGFHGTSHRYVSKRAAEIMGKPYDQLKIITVHVGNGASVAAVLNGVSVDTSMGFTPLEGLVMGTRSGDIDPAIVEFLEKEEGLSAKEVVNILNKKSGVYGLTKGFSRDMRDIVLKAIEGDPVCRLALDVYYYRIAKYIGAYAAAMNGVDAIVFTAGVGENSPIMREEIIENYLGYLGIKIDKEANDFKGEEKIISTPDSKVIAMVVPTNEELMIAKDTKEIIEKGLDELKI

SEQ ID NO: 1207 - DNA, 1251 bp, synthetic construct
  misc_feature 1..1251: note = variant of acetate kinase from Marinitoga sp.38H-ov
  source 1..1251: mol_type = other DNA
atgcaccatcatcatcatcatggcggtagcggcatgaaagttctggtgattaattctggtagctcctccatcaaatatcagctcctcgatatgaccaacgaaaaggtattagcgaaaggcttggtcgagcgcattggcatcgacggttcgcgtatcgtgcataaagttaacggcgaagggcacgtgctggaacatgagattaaaaatcacgaaattggacttaaattggtcctggatcttcttacggacgaaaaatacggtgtgttgaaggatctcaaagaaatcgatgcagttgggcatcgcgtagtacatggcggcgagcgttttgccagtagcgtgaagattactgacgaagtcttaaagaccatcgagacgttgtcgttcttagctccgttacacaatccagcgaacattatgggtatcaagagcagcatgaaagtgttaccgggtgtgcctcaagttgccgtctttgatacagcgttccaccagaagatgccggagaaagcctatttgtacgcaatcccctatgagtactacgagaaatataaaattcgccgctatgggtttcatggaacctcacatcgttatgtgagtaaacgtgctgcggaaattatgggcaaaccgtacgatcagctcaagatcattaccgttcacgtgggtaacggcgcatcagttgcggcggtgaagaatggcgtatctgttgacacttccatgggtttcacaccacttgaaggtcttgtcatgggcacgcgcagcggcgatattgatccggccatcgtggaatttcttgagaaagaagaacagttgtcggccaaagaagtcgtcaacatcctcaacaagaaatctggtgtgtatgggctcaccaaaggctttagtagggacatgcgtgacattgtgctgaaggctattgaaggtgatcctgtatgccgccttgcattagatgtgtattattatcgtatcgcgaaatatattggcgcatacgctgcggccatgaacggtgttgacgcgatcgtctttaccgcaggagttggcgaaaatagcccgattatgcgcgaagaaattattgagaactacttgggctacttagggatcaagatcgataaagaagccaatgacttcaaaggtgaggagaagatcatttcaacgcccgattccaaagtgattgcgatggtagttccgaccaacgaggagctcatgatcgccaaagacacgaaagaaatcattgagaaagggttggacgagcttaagatc

SEQ ID NO: 1208 - protein, 417 aa, synthetic construct
  REGION 1..417: note = variant of acetate kinase from Marinitoga sp.38H-ov
MHHHHHHGGSGMKVLVINSGSSSIKYQLLDMTNEKVLAKGLVERIGIDGSRIVHKVNGEGHVLEHEIKNHEIGLKLVLDLLTDEKYGVLKDLKEIDAVGHRVVHGGERFASSVKITDEVLKTIETLSFLAPLHNPANIMGIKSSMKVLPGVPQVAVFDTAFHQKMPEKAYLYAIPYEYYEKYKIRRYGFHGTSHRYVSKRAAEIMGKPYDQLKIITVHVGNGASVAAVKNGVSVDTSMGFTPLEGLVMGTRSGDIDPAIVEFLEKEEQLSAKEVVNILNKKSGVYGLTKGFSRDMRDIVLKAIEGDPVCRLALDVYYYRIAKYIGAYAAAMNGVDAIVFTAGVGENSPIMREEIIENYLGYLGIKIDKEANDFKGEEKIISTPDSKVIAMVVPTNEELMIAKDTKEIIEKGLDELKI

SEQ ID NO: 1209 - DNA, 1251 bp, synthetic construct
  misc_feature 1..1251: note = variant of acetate kinase from Marinitoga sp.38H-ov
  source 1..1251: mol_type = other DNA
atgcaccatcatcatcatcatggcggtagcggcatgaaagttctggtgattaattctggtagctcctccatcaaatatcagctcctcgatatgaccaacgaaaaggtattagcgaaaggcttggtcgagcgcattggcatcgacggttcgcgtatcgtgcataaagttaacggcgaagggcacgtgctggaacatgagattaaaaatcacgaaattggacttaaattggtcctggatcttcttacggacgaaaaatacggtgtgttgaaggatctcaaagaaatcgatgcagttgggcatcgcgtagtacatggcggcgagcgttttgccagtagcgtgaagattactgacgaagtcttaaagaccatcgagacgttgtcgttcttagctccgttacacaatccagcgaacattatgggtatcaagagcagcatgaaagtgttaccgggtgtgcctcaagttgccgtctttgatacagcgttccaccagaagatgccggagaaagcctatttgtacgcaatcccctatgagtactacgagaaatataaaattcgccgctatgggtttcatggaacctcacatcgttatgtgagtaaacgtgctgcggaaattatgggcaaaccgtacgatcagctcaagatcattaccgttcacgtgggtaacggcgcatcagttgcggcggtgaagaatggcgtatctgttgacacttccatgggtttcacaccacttgaaggtcttgtcatgggcacgcgcagcggcgatattgatccggccatcgtggaatttcttgagaaagaagaaggattgtcggccaaagaagtcgtcaacatcctcaacaagaaatctggtgtgtatgggctcaccaaaggctttagtagggacatgcgtgacattgtgctgaaggctattgaaggtgatcctgtatgccgccttgcattagatgtgtattattatcgtatcgcgaaatatattggcgcatacgctgcggccatgaacggtgttgacgcgatcgtctttaccgcaggagttggcgaaaatagcccgattatgcgcgaagaaattattgagaactacttgggctacttagggttgaagatcgataaagaagccaatgacttcaaaggtgaggagaagatcatttcaacgcccgattccaaagtgattgcgatggtagttccgaccaacgaggagctcatgatcgccaaagacacgaaagaaatcattgagaaagggttggacgagcttaagatc

SEQ ID NO: 1210 - protein, 417 aa, synthetic construct
  REGION 1..417: note = variant of acetate kinase from Marinitoga sp.38H-ov
MHHHHHHGGSGMKVLVINSGSSSIKYQLLDMTNEKVLAKGLVERIGIDGSRIVHKVNGEGHVLEHEIKNHEIGLKLVLDLLTDEKYGVLKDLKEIDAVGHRVVHGGERFASSVKITDEVLKTIETLSFLAPLHNPANIMGIKSSMKVLPGVPQVAVFDTAFHQKMPEKAYLYAIPYEYYEKYKIRRYGFHGTSHRYVSKRAAEIMGKPYDQLKIITVHVGNGASVAAVKNGVSVDTSMGFTPLEGLVMGTRSGDIDPAIVEFLEKEEGLSAKEVVNILNKKSGVYGLTKGFSRDMRDIVLKAIEGDPVCRLALDVYYYRIAKYIGAYAAAMNGVDAIVFTAGVGENSPIMREEIIENYLGYLGLKIDKEANDFKGEEKIISTPDSKVIAMVVPTNEELMIAKDTKEIIEKGLDELKI

SEQ ID NO: 1211 - DNA, 1251 bp, synthetic construct
  misc_feature 1..1251: note = variant of acetate kinase from Marinitoga sp.38H-ov
  source 1..1251: mol_type = other DNA
atgcaccatcatcatcatcatggcggtagcggcatgaaagttctggtgattaattctggtagctcctccatcaaatatcagctcctcgatatgaccaacgaaaaggtattagcgaaaggcttggtcgagcgcattggcatcgacggttcgcgtatcgtgcataaagttaacggcgaagggcacgtgctggaacatgagattaaaaatcacgaaattggacttaaattggtcctggatcttcttacggacgaaaaatacggtgtgttgaaggatctcaaagaaatcgatgcagttgggcatcgcgtagtacatggcggcgagcgttttgccagtagcgtgaagattactgacgaagtcttaaagaccatcgagacgttgtcgttcttagctccgttacacaatccagcgaacattatgggtatcaagagcagcatgaaagtgttaccgggtgtgcctcaagttgccgtctttgatacagcgttccaccagaagatgccggagaaagcctatttgtacgcaatcccctatgagtactacgagaaatataaaattcgccgctatgggtttcatggaacctcacatcgttatgtgagtaaacgtgctgcggaaattatgggcaaaccgtacgatcagctcaagatcattaccgttcacgtgggtaacggcgcatcagttgcggcggtgaagaatggcgtatctgttgacacttccatgggtttcacaccacttgaaggtcttgtcatgggcacgcgcagcggcgatattgatccggccatcgtggaatttcttgagaaagaagaaggattgtcggccaaagaagtcgtcaacatcctcaacaagaaatctggtgtgtatgggctcaccaaaggctttagtagggacatgcgtgacattgtgctgaaggctattgaaggtgatcctgtatgccgccttgcattagatgtgtattattatcgtatcgcgaaatatattggcgcatacgctgcggccatgaacggtgttgacgcgatcgtctttaccgcaggagttggcgaaaatagcccgattatgcgcgaagaaattattgagaactacttgggctacttagggatcaagatcgataaagaaacgaatgacttcaaaggtgaggagaagatcatttcaacgcccgattccaaagtgattgcgatggtagttccgaccaacgaggagctcatgatcgccaaagacacgaaagaaatcattgagaaagggttggacgagcttaagatc

SEQ ID NO: 1212 - protein, 417 aa, synthetic construct
  REGION 1..417: note = variant of acetate kinase from Marinitoga sp.38H-ov
MHHHHHHGGSGMKVLVINSGSSSIKYQLLDMTNEKVLAKGLVERIGIDGSRIVHKVNGEGHVLEHEIKNHEIGLKLVLDLLTDEKYGVLKDLKEIDAVGHRVVHGGERFASSVKITDEVLKTIETLSFLAPLHNPANIMGIKSSMKVLPGVPQVAVFDTAFHQKMPEKAYLYAIPYEYYEKYKIRRYGFHGTSHRYVSKRAAEIMGKPYDQLKIITVHVGNGASVAAVKNGVSVDTSMGFTPLEGLVMGTRSGDIDPAIVEFLEKEEGLSAKEVVNILNKKSGVYGLTKGFSRDMRDIVLKAIEGDPVCRLALDVYYYRIAKYIGAYAAAMNGVDAIVFTAGVGENSPIMREEIIENYLGYLGIKIDKETNDFKGEEKIISTPDSKVIAMVVPTNEELMIAKDTKEIIEKGLDELKI

SEQ ID NO: 1213 - DNA, 1251 bp, synthetic construct
  misc_feature 1..1251: note = variant of acetate kinase from Marinitoga sp.38H-ov
  source 1..1251: mol_type = other DNA
atgcaccatcatcatcatcatggcggtagcggcatgaaagttctggtgattaattctggtagctcctccatcaaatatcagctcctcgatatgaccaacgaaaaggtattagcgaaaggcttggtcgagcgcattggcatcgacggttcgcgtatcgtgcataaagttaacggcgaagggcacgtgctggaacatgagattaaaaatcacgaaattggacttaaattggtcctggatcttcttacggacgaaaaatacggtgtgttgaaggatctcaaagaaatcgatgcagttgggcatcgcgtagtacatggcggcgagcgttttgccagtagcgtgaagattactgacgaagtcttaaagaccatcgagacgttgtcgttcttagctccgttacacaatccagcgaacattatgggtatcaagagcagcatgaaagtgttaccgggtgtgcctcaagttgccgtctttgatacagcgttccaccagaagatgccggagaaagcctatttgtacgcaatcccctatgagtactacgagaaatataaaattcgccgctatgggtttcatggaacctcacatcgttatgtgagtaaacgtgctgcggaaattatgggcaaaccgtacgatcagctcaagatcattaccgttcacgtgggtaacggcgcatcagttgcggcggtgaagaatggcgtatctgttgacacttccatgggtttcacaccacttgaaggtcttgtcatgggcacgcgcagcggcgatattgatccggccatcgtggaatttcttgagaaagaagaaggattgtcggccaaacatgtcgtcaacatcctcaacaagaaatctggtgtgtatgggctcaccaaaggctttagtagggacatgcgtgacattgtgctgaaggctattgaaggtgatcctgtatgccgccttgcattagatgtgtattattatcgtatcgcgaaatatattggcgcatacgctgcggccatgaacggtgttgacgcgatcgtctttaccgcaggagttggcgaaaatagcccgattatgcgcgaagaaattattgagaactacttgggctacttagggatcaagatcgataaagaagccaatgacttcaaaggtgaggagaagatcatttcaacgcccgattccaaagtgattgcgatggtagttccgaccaacgaggagctcatgatcgccaaagacacgaaagaaatcattgagaaagggttggacgagcttaagatc

SEQ ID NO: 1214 - protein, 417 aa, synthetic construct
  REGION 1..417: note = variant of acetate kinase from Marinitoga sp.38H-ov
MHHHHHHGGSGMKVLVINSGSSSIKYQLLDMTNEKVLAKGLVERIGIDGSRIVHKVNGEGHVLEHEIKNHEIGLKLVLDLLTDEKYGVLKDLKEIDAVGHRVVHGGERFASSVKITDEVLKTIETLSFLAPLHNPANIMGIKSSMKVLPGVPQVAVFDTAFHQKMPEKAYLYAIPYEYYEKYKIRRYGFHGTSHRYVSKRAAEIMGKPYDQLKIITVHVGNGASVAAVKNGVSVDTSMGFTPLEGLVMGTRSGDIDPAIVEFLEKEEGLSAKHVVNILNKKSGVYGLTKGFSRDMRDIVLKAIEGDPVCRLALDVYYYRIAKYIGAYAAAMNGVDAIVFTAGVGENSPIMREEIIENYLGYLGIKIDKEANDFKGEEKIISTPDSKVIAMVVPTNEELMIAKDTKEIIEKGLDELKI

SEQ ID NO: 1215 - DNA, 1251 bp, synthetic construct
  misc_feature 1..1251: note = variant of acetate kinase from Marinitoga sp.38H-ov
  source 1..1251: mol_type = other DNA
atgcaccatcatcatcatcatggcggtagcggcatgaaagttctggtgattaatgggggtagctcctccatcaaatatcagctcctcgatatgaccaacgaaaaggtattagcgaaaggcttggtcgagcgcattggcatcgacggttcgcgtatcgtgcataaagttaacggcgaagggcacgtgctggaacatgagattaaaaatcacgaaattggacttaaattggtcctggatcttcttacggacgaaaaatacggtgtgttgaaggatctcaaagaaatcgatgcagttgggcatcgcgtagtacatggcggcgagcgttttgccagtagcgtgaagattactgacgaagtcttaaagaccatcgagacgttgtcgttcttagctccgttacacaatccagcgaacattatgggtatcaagagcagcatgaaagtgttaccgggtgtgcctcaagttgccgtctttgatacagcgttccaccagaagatgccggagaaagcctatttgtacgcaatcccctatgagtactacgagaaatataaaattcgccgctatgggtttcatggaacctcacatcgttatgtgagtaaacgtgctgcggaaattatgggcaaaccgtacgatcagctcaagatcattaccgttcacgtgggtaacggcgcatcagttgcggcggtgaagaatggcgtatctgttgacacttccatgggtttcacaccacttgaaggtcttgtcatgggcacgcgcagcggcgatattgatccggccatcgtggaatttcttgagaaagaagaaggattgtcggccaaagaagtcgtcaacatcctcaacaagaaatctggtgtgtatgggctcaccaaaggctttagtagggacatgcgtgacattgtgctgaaggctattgaaggtgatcctgtatgccgccttgcattagatgtgtattattatcgtatcgcgaaatatattggcgcatacgctgcggccatgaacggtgttgacgcgatcgtctttaccgcaggagttggcgaaaatagcccgattatgcgcgaagaaattattgagaactacttgggctacttagggatcaagatcgataaagaagccaatgacttcaaaggtgaggagaagatcatttcaacgcccgattccaaagtgattgcgatggtagttccgaccaacgaggagctcatgatcgccaaagacacgaaagaaatcattgagaaagggttggacgagcttaagatc

SEQ ID NO: 1216 - protein, 417 aa, synthetic construct
  REGION 1..417: note = variant of acetate kinase from Marinitoga sp.38H-ov
MHHHHHHGGSGMKVLVINGGSSSIKYQLLDMTNEKVLAKGLVERIGIDGSRIVHKVNGEGHVLEHEIKNHEIGLKLVLDLLTDEKYGVLKDLKEIDAVGHRVVHGGERFASSVKITDEVLKTIETLSFLAPLHNPANIMGIKSSMKVLPGVPQVAVFDTAFHQKMPEKAYLYAIPYEYYEKYKIRRYGFHGTSHRYVSKRAAEIMGKPYDQLKIITVHVGNGASVAAVKNGVSVDTSMGFTPLEGLVMGTRSGDIDPAIVEFLEKEEGLSAKEVVNILNKKSGVYGLTKGFSRDMRDIVLKAIEGDPVCRLALDVYYYRIAKYIGAYAAAMNGVDAIVFTAGVGENSPIMREEIIENYLGYLGIKIDKEANDFKGEEKIISTPDSKVIAMVVPTNEELMIAKDTKEIIEKGLDELKI

SEQ ID NO: 1217 - DNA, 1251 bp, synthetic construct
  misc_feature 1..1251: note = variant of acetate kinase from Marinitoga sp.38H-ov
  source 1..1251: mol_type = other DNA
atgcaccatcatcatcatcatggcggtagcggcatgaaagttctggtgattaattctggtagctcctccatcaaatatcagctcctcgatatgaccaacgaaaaggtattagcgaaaggcttggtcgagcgcattggcatcgacggttcgcgtatcgtgcataaagttaacggcgaagggcacgtgctggaacatgagattaaaaatcacgaaattggacttaaattggtcctggatcttcttacggacgaaaaatacggtgtgttgaaggatctcaaagaaatcgatgcagttgggcatcgcgtagtacatggcggcgagcgttttgccagtagcgtgaagattactgacgaagtcttaaagaccatcgagacgttgtcgttcttagctccgttacacaatccagcgaacattatgggtatcaagagcagcatgaaagtgttaccgggtgtgcctcaagttgccgtctttgatacagcgttccaccagaagatgccggagaaagcctatttgtacgcaatcccctatgagtactacgagaaatataaaattcgccgctatgggtttcatggaacctcacatcgttatgtgagtaaacgtgctgcggaaattatgggcaaaccgtacgatcagctcaagatcattaccgttcacgtgggtaacggcgcatcagttgcggcggtgaagaatggcgtatctgttgacacttccatgggtttcacaccacttgaaggtcttgtcatgggcacgcgcagcggcgatattgatccggccatcgtggaatttcttgagaaagaagaaggattgtcggccaaagaagtcgtcaacatcctcaacaagaaatctggtgtgtatgggctcaccaaaggctttagtagggacatgcgtgacattgtgctgaaggctattgaaggtgatcctgtatgccgccttgcattagatgtgtattattatcgtatcgcgaaatatattggcgcatacgctgcggccatgaacggtgttgacgcgatcgtctttaccgcaggagttggcgaaaatagcccgattatgcgcgaagaaattattgagaactacttgggctacttagggatcaagatcgataaagaagccaatgacttcaaaggtgaggagaagatcatttcaacgcccgattccaaagtgattgcgggggtagttccgaccaacgaggagctcatgatcgccaaagacacgaaagaaatcattgagaaagggttggacgagcttaagatc

SEQ ID NO: 1218 - protein, 417 aa, synthetic construct
  REGION 1..417: note = variant of acetate kinase from Marinitoga sp.38H-ov
MHHHHHHGGSGMKVLVINSGSSSIKYQLLDMTNEKVLAKGLVERIGIDGSRIVHKVNGEGHVLEHEIKNHEIGLKLVLDLLTDEKYGVLKDLKEIDAVGHRVVHGGERFASSVKITDEVLKTIETLSFLAPLHNPANIMGIKSSMKVLPGVPQVAVFDTAFHQKMPEKAYLYAIPYEYYEKYKIRRYGFHGTSHRYVSKRAAEIMGKPYDQLKIITVHVGNGASVAAVKNGVSVDTSMGFTPLEGLVMGTRSGDIDPAIVEFLEKEEGLSAKEVVNILNKKSGVYGLTKGFSRDMRDIVLKAIEGDPVCRLALDVYYYRIAKYIGAYAAAMNGVDAIVFTAGVGENSPIMREEIIENYLGYLGIKIDKEANDFKGEEKIISTPDSKVIAGVVPTNEELMIAKDTKEIIEKGLDELKI

SEQ ID NO: 1219 - DNA, 1251 bp, synthetic construct
  misc_feature 1..1251: note = variant of acetate kinase from Marinitoga sp.38H-ov
  source 1..1251: mol_type = other DNA
atgcaccatcatcatcatcatggcggtagcggcatgaaagttctggtgattaattctggtagctcctccatcaaatatcagctcctcgatatgaccaacgaaaaggtattagcgaaaggcttggtcgagcgcattggcatcgacggttcgcgtatcgtgcataaagttaacggcgaagggcacgtgctggaacatgagattaaaaatcacgaaattggacttaaattggtcctggatcttcttacggacgaaaaatacggtgtgttgaaggatctcaaagaaatcgatgcagttgggcatcgcgtagtacatggcggcgagcgttttgccagtagcgtgaagattactgacgaagtcttaaagaccatcgagacgttgtcgttcttagctccgttacacaatccagcgaacattatgggtatcaagagcagcatgaaagtgttaccgggtgtgcctcaagttgccgtctttgatacagcgttccaccagaagatgccggagaaagcctatttgtacgcaatcccctatgagtactacgagaaatataaaattcgccgctatgggtttcatggaacctcacatcgttatgtgagtaaacgtgctgcggaaattatgggcaaaccgtacgatcagctcaagatcattaccgttcacgtgggtaacggcgcatcagttgcggcggtgaagaatggcgtatctgttgacacttccatgggtttcacaccacttgaaggtcttgtcatgggcacgcgcagcggcgatattgatgtggccatcgtggaatttcttgagaaagaagaaggattgtcggccaaagaagtcgtcaacatcctcaacaagaaatctggtgtgtatgggctcaccaaaggctttagtagggacatgcgtgacattgtgctgaaggctattgaaggtgatcctgtatgccgccttgcattagatgtgtattattatcgtatcgcgaaatatattggcgcatacgctgcggccatgaacggtgttgacgcgatcgtctttaccgcaggagttggcgaaaatagcccgattatgcgcgaagaaattattgagaactacttgggctacttagggatcaagatcgataaagaagccaatgacttcaaaggtgaggagaagatcatttcaacgcccgattccaaagtgattgcgatggtagttccgaccaacgaggagctcatgatcgccaaagacacgaaagaaatcattgagaaagggttggacgagcttaagatc

SEQ ID NO: 1220 - protein, 417 aa, synthetic construct
  REGION 1..417: note = variant of acetate kinase from Marinitoga sp.38H-ov
MHHHHHHGGSGMKVLVINSGSSSIKYQLLDMTNEKVLAKGLVERIGIDGSRIVHKVNGEGHVLEHEIKNHEIGLKLVLDLLTDEKYGVLKDLKEIDAVGHRVVHGGERFASSVKITDEVLKTIETLSFLAPLHNPANIMGIKSSMKVLPGVPQVAVFDTAFHQKMPEKAYLYAIPYEYYEKYKIRRYGFHGTSHRYVSKRAAEIMGKPYDQLKIITVHVGNGASVAAVKNGVSVDTSMGFTPLEGLVMGTRSGDIDVAIVEFLEKEEGLSAKEVVNILNKKSGVYGLTKGFSRDMRDIVLKAIEGDPVCRLALDVYYYRIAKYIGAYAAAMNGVDAIVFTAGVGENSPIMREEIIENYLGYLGIKIDKEANDFKGEEKIISTPDSKVIAMVVPTNEELMIAKDTKEIIEKGLDELKI

SEQ ID NO: 1221 - DNA, 1251 bp, synthetic construct
  misc_feature 1..1251: note = variant of acetate kinase from Marinitoga sp.38H-ov
  source 1..1251: mol_type = other DNA
atgcaccatcatcatcatcatggcggtagcggcatgaaagttctggtgattaattctggtagctcctccatcaaatatcagctcctcgatatgaccaacgaaaaggtattagcgaaaggcttggtcgagcgcattggcatcgacggttcgcgtatcgtgcataaagttaacggcgaagggcacgtgctggaacatgagattaaaaatcacgaaattggacttaaattggtcctggatcttcttacggacgaaaaatacggtgtgttgaaggatctcaaagaaatcgatgcagttgggcatcgcgtagtacatggcggcgagcgttttgccagtagcgtgaagattactgacgaagtcttaaagaccatcgagacgttgtcgttcttagctccgttacacaatccagcgaacattatgggtatcaagagcagcatgaaagtgttaccgggtgtgcctcaagttgccgtctttgatacagcgttccaccagaagatgccggagaaagcctatttgtacgcaatcccctatgagtactacgagaaatataaaattcgccgctatgggtttcatggaacctcacatcgttatgtgagtaaacgtgctgcggaaattatgggcaaaccgtacgatcagctcaagatcattaccgttcacgtgggtaacggcgcatcagttgcggcggtgaagaatggcgtatctgttgacacttccatgggtttcacaccacttgaaggtcttgtcatgggcacgcgcagcggcgatattgatccggccatcgtggaatttcttgagaaagaagaaggattgtcggccaaagaagtcgtcaacatcctcaacaagaaatctggtgtgtatgggctcaccaaaggctttagtagggacatgcgtgacattgtgctgaaggctattgaaggtgatcctgtatgccgccttgcattagatgtgtattattatcgtatcgcgaaatatattggcgcatacgctgcggccatgaacggtgttgacgcgatcgtctttaccgcaggagttggcgaaaatagcccgattatgcgcgaagaaattattgagaactacttgggctacttagtgatcaagatcgataaagaagccaatgacttcaaaggtgaggagaagatcatttcaacgcccgattccaaagtgattgcgatggtagttccgaccaacgaggagctcatgatcgccaaagacacgaaagaaatcattgagaaagggttggacgagcttaagatc

SEQ ID NO: 1222 - protein, 417 aa, synthetic construct
  REGION 1..417: note = variant of acetate kinase from Marinitoga sp.38H-ov
MHHHHHHGGSGMKVLVINSGSSSIKYQLLDMTNEKVLAKGLVERIGIDGSRIVHKVNGEGHVLEHEIKNHEIGLKLVLDLLTDEKYGVLKDLKEIDAVGHRVVHGGERFASSVKITDEVLKTIETLSFLAPLHNPANIMGIKSSMKVLPGVPQVAVFDTAFHQKMPEKAYLYAIPYEYYEKYKIRRYGFHGTSHRYVSKRAAEIMGKPYDQLKIITVHVGNGASVAAVKNGVSVDTSMGFTPLEGLVMGTRSGDIDPAIVEFLEKEEGLSAKEVVNILNKKSGVYGLTKGFSRDMRDIVLKAIEGDPVCRLALDVYYYRIAKYIGAYAAAMNGVDAIVFTAGVGENSPIMREEIIENYLGYLVIKIDKEANDFKGEEKIISTPDSKVIAMVVPTNEELMIAKDTKEIIEKGLDELKI

SEQ ID NO: 1223 - DNA, 1251 bp, synthetic construct
  misc_feature 1..1251: note = variant of acetate kinase from Marinitoga sp.38H-ov
  source 1..1251: mol_type = other DNA
atgcaccatcatcatcatcatggcggtagcggcatgaaagttctggtgattaattctggtagctcctccatcaaatatcagctcctcgatatgaccaacgaaaaggtattagcgaaaggcttggtcgagcgcattggcatcgacggttcgcgtatcgtgcataaagttaacggcgaagggcacgtgctggaacatgagattaaaaatcacgaaattggacttaaattggtcctggatcttcttacggacgaaaaatacggtgtgttgaaggatctcaaagaaatcgatgcagttgggcatcgcgtagtacatggcggcgagcgttttgccagtagcgtgaagattactgacgaagtcttaaagaccatcgagacgttgtcgttcttagctccgttacacaatccagcgaacattatgggtatcaagagcagcatgaaagtgttaccgggtgtgcctcaagttgccgtctttgatacagcgttccaccagaagatgccggagaaagcctatttgtacgcaatcccctatgagtactacgagaaatataaaattcgccgctatgggtttcatggaacctcacatcgttatgtgagtaaacgtgctgcggaaattatgggcaaaccgtacgatcagctcaagatcattaccgttcacgtgggtaacggcgcatcagttgcggcggtgaagaatggcgtatctgttgacacttccatgggtttcacaccacttgaaggtcttgtcatgggcacgcgcagcggcgatattgatccggccatcgtggaatttcttgagaaatatgaaggattgtcggccaaagaagtcgtcaacatcctcaacaagaaatctggtgtgtatgggctcaccaaaggctttagtagggacatgcgtgacattgtgctgaaggctattgaaggtgatcctgtatgccgccttgcattagatgtgtattattatcgtatcgcgaaatatattggcgcatacgctgcggccatgaacggtgttgacgcgatcgtctttaccgcaggagttggcgaaaatagcccgattatgcgcgaagaaattattgagaactacttgggctacttagggatcaagatcgataaagaagccaatgacttcaaaggtgaggagaagatcatttcaacgcccgattccaaagtgattgcgatggtagttccgaccaacgaggagctcatgatcgccaaagacacgaaagaaatcattgagaaagggttggacgagcttaagatc

SEQ ID NO: 1224 - protein, 417 aa, synthetic construct
  REGION 1..417: note = variant of acetate kinase from Marinitoga sp.38H-ov
MHHHHHHGGSGMKVLVINSGSSSIKYQLLDMTNEKVLAKGLVERIGIDGSRIVHKVNGEGHVLEHEIKNHEIGLKLVLDLLTDEKYGVLKDLKEIDAVGHRVVHGGERFASSVKITDEVLKTIETLSFLAPLHNPANIMGIKSSMKVLPGVPQVAVFDTAFHQKMPEKAYLYAIPYEYYEKYKIRRYGFHGTSHRYVSKRAAEIMGKPYDQLKIITVHVGNGASVAAVKNGVSVDTSMGFTPLEGLVMGTRSGDIDPAIVEFLEKYEGLSAKEVVNILNKKSGVYGLTKGFSRDMRDIVLKAIEGDPVCRLALDVYYYRIAKYIGAYAAAMNGVDAIVFTAGVGENSPIMREEIIENYLGYLGIKIDKEANDFKGEEKIISTPDSKVIAMVVPTNEELMIAKDTKEIIEKGLDELKI

SEQ ID NO: 1225 - DNA, 1251 bp, synthetic construct
  misc_feature 1..1251: note = variant of acetate kinase from Marinitoga sp.38H-ov
  source 1..1251: mol_type = other DNA
atgcaccatcatcatcatcatggcggtagcggcatgaaagttctggtgattaattctggtagctcctccatcaaatatcagctcctcgatatgaccaacgaaaaggtattagcgaaaggcttggtcgagcgcattggcatcgacggttcgcgtatcgtgcataaagttaacggcgaagggcacgtgctggaacatgagattaaaaatcacgaaattggacttaaattggtcctggatcttcttacggacgaaaaatacggtgtgttgaaggatctcaaagaaatcgatgcagttgggcatcgcgtagtacatggcggcgagcgttttgccagtagcgtgaagattactgacgaagtcttaaagaccatcgagacgttgtcgttcttagctccgttacacaatccagcgaacattatgggtatcaagagcagcatgaaagtgttaccgggtgtgcctcaagttgccgtctttgatacagcgttccaccagaagatgccggagaaagcctatttgtacgcaatcccctatgagtactacgagaaatataaaattcgccgctatgggtttcatggaacctcacatcgttatgtgagtaaacgtgctgcggaaattatgggcaaaccgtacgatcagctcaagatcattaccgttcacgtgggtaacggcgcatcagttgcggcggtgaagaatggcgtatctgttgacacttccatgggtttcacaccacttgaaggtcttgtcatgggcacgcgcagcggcgatattgatccggccatcgtggaatttcttgagaaagaagaaggattgtcggccaaagaagtcgtcaacatcctcaacaagaaatctggtgtgtatgggctcaccaaaggctttagtagggacatgcgtgacattgtgctgaaggctattgaaggtgatcctgtatgccgccttgcattagatgtgtattattatcgtatcgcgaaatatattggcgcatacgctgcggccatgaacggtgttgacgcgatcgtctttaccgcaggagttggcgaaaatagcccgattatgcgcgaagaaattattgagaactacttgggctacttagggatcaagatcgataaagaagccaatgacttcaaaggtgaggagaagatcatttcaacgcccgattccaaagtgattgcgatggtagttccgaccaacgaggagctcatgatcgccatggacacgaaagaaatcattgagaaagggttggacgagcttaagatc

SEQ ID NO: 1226 - protein, 417 aa, synthetic construct
  REGION 1..417: note = variant of acetate kinase from Marinitoga sp.38H-ov
MHHHHHHGGSGMKVLVINSGSSSIKYQLLDMTNEKVLAKGLVERIGIDGSRIVHKVNGEGHVLEHEIKNHEIGLKLVLDLLTDEKYGVLKDLKEIDAVGHRVVHGGERFASSVKITDEVLKTIETLSFLAPLHNPANIMGIKSSMKVLPGVPQVAVFDTAFHQKMPEKAYLYAIPYEYYEKYKIRRYGFHGTSHRYVSKRAAEIMGKPYDQLKIITVHVGNGASVAAVKNGVSVDTSMGFTPLEGLVMGTRSGDIDPAIVEFLEKEEGLSAKEVVNILNKKSGVYGLTKGFSRDMRDIVLKAIEGDPVCRLALDVYYYRIAKYIGAYAAAMNGVDAIVFTAGVGENSPIMREEIIENYLGYLGIKIDKEANDFKGEEKIISTPDSKVIAMVVPTNEELMIAMDTKEIIEKGLDELKI

SEQ ID NO: 1227 - DNA, 1251 bp, synthetic construct
  misc_feature 1..1251: note = variant of acetate kinase from Marinitoga sp.38H-ov
  source 1..1251: mol_type = other DNA
atgcaccatcatcatcatcatggcggtagcggcatgaaagttctggtgattaattctggtagctcctccatcaaatatcagctcctcgatatgaccaacgaaaaggtattagcgaaaggcttggtcgagcgcattggcatcgacggttcgcgtatcgtgcataaagttaacggcgaagggcacgtgctggaacatgagattaaaaatcacgaaattggacttaaattggtcctggatcttcttacggacgaaaaatacggtgtgttgaaggatctcaaagaaatcgatgcagttgggcatcgcgtagtacatggcggcgagcgttttgccagtagcgtgaagattactatggaagtcttaaagaccatcgagacgttgtcgttcttagctccgttacacaatccagcgaacattatgggtatcaagagcagcatgaaagtgttaccgggtgtgcctcaagttgccgtctttgatacagcgttccaccagaagatgccggagaaagcctatttgtacgcaatcccctatgagtactacgagaaatataaaattcgccgctatgggtttcatggaacctcacatcgttatgtgagtaaacgtgctgcggaaattatgggcaaaccgtacgatcagctcaagatcattaccgttcacgtgggtaacggcgcatcagttgcggcggtgaagaatggcgtatctgttgacacttccatgggtttcacaccacttgaaggtcttgtcatgggcacgcgcagcggcgatattgatccggccatcgtggaatttcttgagaaagaagaaggattgtcggccaaagaagtcgtcaacatcctcaacaagaaatctggtgtgtatgggctcaccaaaggctttagtagggacatgcgtgacattgtgctgaaggctattgaaggtgatcctgtatgccgccttgcattagatgtgtattattatcgtatcgcgaaatatattggcgcatacgctgcggccatgaacggtgttgacgcgatcgtctttaccgcaggagttggcgaaaatagcccgattatgcgcgaagaaattattgagaactacttgggctacttagggatcaagatcgataaagaagccaatgacttcaaaggtgaggagaagatcatttcaacgcccgattccaaagtgattgcgatggtagttccgaccaacgaggagctcatgatcgccaaagacacgaaagaaatcattgagaaagggttggacgagcttaagatc

SEQ ID NO: 1228 - protein, 417 aa, synthetic construct
  REGION 1..417: note = variant of acetate kinase from Marinitoga sp.38H-ov
MHHHHHHGGSGMKVLVINSGSSSIKYQLLDMTNEKVLAKGLVERIGIDGSRIVHKVNGEGHVLEHEIKNHEIGLKLVLDLLTDEKYGVLKDLKEIDAVGHRVVHGGERFASSVKITMEVLKTIETLSFLAPLHNPANIMGIKSSMKVLPGVPQVAVFDTAFHQKMPEKAYLYAIPYEYYEKYKIRRYGFHGTSHRYVSKRAAEIMGKPYDQLKIITVHVGNGASVAAVKNGVSVDTSMGFTPLEGLVMGTRSGDIDPAIVEFLEKEEGLSAKEVVNILNKKSGVYGLTKGFSRDMRDIVLKAIEGDPVCRLALDVYYYRIAKYIGAYAAAMNGVDAIVFTAGVGENSPIMREEIIENYLGYLGIKIDKEANDFKGEEKIISTPDSKVIAMVVPTNEELMIAKDTKEIIEKGLDELKI

SEQ ID NO: 1229 - DNA, 1251 bp, synthetic construct
  misc_feature 1..1251: note = variant of acetate kinase from Marinitoga sp.38H-ov
  source 1..1251: mol_type = other DNA
atgcaccatcatcatcatcatggcggtagcggcatgaaagttctggtgattaattctggtagctcctccatcaaatatcagctcctcgatatgaccaacgaaaaggtattatttaaaggcttggtcgagcgcattggcatcgacggttcgcgtatcgtgcataaagttaacggcgaagggcacgtgctggaacatgagattaaaaatcacgaaattggacttaaattggtcctggatcttcttacggacgaaaaatacggtgtgttgaaggatctcaaagaaatcgatgcagttgggcatcgcgtagtacatggcggcgagcgttttgccagtagcgtgaagattactgacgaagtcttaaagaccatcgagacgttgtcgttcttagctccgttacacaatccagcgaacattatgggtatcaagagcagcatgaaagtgttaccgggtgtgcctcaagttgccgtctttgatacagcgttccaccagaagatgccggagaaagcctatttgtacgcaatcccctatgagtactacgagaaatataaaattcgccgctatgggtttcatggaacctcacatcgttatgtgagtaaacgtgctgcggaaattatgggcaaaccgtacgatcagctcaagatcattaccgttcacgtgggtaacggcgcatcagttgcggcggtgaagaatggcgtatctgttgacacttccatgggtttcacaccacttgaaggtcttgtcatgggcacgcgcagcggcgatattgatccggccatcgtggaatttcttgagaaagaagaaggattgtcggccaaagaagtcgtcaacatcctcaacaagaaatctggtgtgtatgggctcaccaaaggctttagtagggacatgcgtgacattgtgctgaaggctattgaaggtgatcctgtatgccgccttgcattagatgtgtattattatcgtatcgcgaaatatattggcgcatacgctgcggccatgaacggtgttgacgcgatcgtctttaccgcaggagttggcgaaaatagcccgattatgcgcgaagaaattattgagaactacttgggctacttagggatcaagatcgataaagaagccaatgacttcaaaggtgaggagaagatcatttcaacgcccgattccaaagtgattgcgatggtagttccgaccaacgaggagctcatgatcgccaaagacacgaaagaaatcattgagaaagggttggacgagcttaagatc

SEQ ID NO: 1230 - protein, 417 aa, synthetic construct
  REGION 1..417: note = variant of acetate kinase from Marinitoga sp.38H-ov
MHHHHHHGGSGMKVLVINSGSSSIKYQLLDMTNEKVLFKGLVERIGIDGSRIVHKVNGEGHVLEHEIKNHEIGLKLVLDLLTDEKYGVLKDLKEIDAVGHRVVHGGERFASSVKITDEVLKTIETLSFLAPLHNPANIMGIKSSMKVLPGVPQVAVFDTAFHQKMPEKAYLYAIPYEYYEKYKIRRYGFHGTSHRYVSKRAAEIMGKPYDQLKIITVHVGNGASVAAVKNGVSVDTSMGFTPLEGLVMGTRSGDIDPAIVEFLEKEEGLSAKEVVNILNKKSGVYGLTKGFSRDMRDIVLKAIEGDPVCRLALDVYYYRIAKYIGAYAAAMNGVDAIVFTAGVGENSPIMREEIIENYLGYLGIKIDKEANDFKGEEKIISTPDSKVIAMVVPTNEELMIAKDTKEIIEKGLDELKI

SEQ ID NO: 1231 - DNA, 1251 bp, synthetic construct
  misc_feature 1..1251: note = variant of acetate kinase from Marinitoga sp.38H-ov
  source 1..1251: mol_type = other DNA
atgcaccatcatcatcatcatggcggtagcggcatgaaagttctggtgattaattctggtagctcctccatcaaatatcagctcctcgatatgaccaacgaaaaggtattagcgaaaggcttggtcgagcgcattggcatcgacggttcgcgtatcgtgcataaagttaacggcgaagggcacgtgctggaacatgagattaaaaatcacgaaattggacttaaattggtcctggatcttcttacggacgaaaaatacggtgtgttgaaggatctcaaagaaatcgatgcagttgggcatcgcgtagtacatggcggcgagcgttttgccagtagcgtgaagattactgacgaagtcttaaagaccatcgagacgttgtcgttcttagctccgttacacaatccagcgaacattatgggtatcaagagcagcatgaaagtgttaccgggtgtgcctcaagttgccgtctttgatacagcgttccaccagaagatgccggagaaagcctatttgtacgcaatcccctatgagtactacgagaaatataaaattcgccgctatgggtttcatggaacctcacatcgttatgtgagtaaacgtgctgcggaaattatgggcaaaccgtacgatcagctcaagatcattaccgttcacgtgggtaacggcgcatcagttgcggcggtgaagaatggcgtatctgttgacacttccatgggtttcacaccacttgaaggtcttgtcatgggcacgcgcagcggcgatattgatccggccatcgtgtcttttcttgagaaagaagaaggattgtcggccaaagaagtcgtcaacatcctcaacaagaaatctggtgtgtatgggctcaccaaaggctttagtagggacatgcgtgacattgtgctgaaggctattgaaggtgatcctgtatgccgccttgcattagatgtgtattattatcgtatcgcgaaatatattggcgcatacgctgcggccatgaacggtgttgacgcgatcgtctttaccgcaggagttggcgaaaatagcccgattatgcgcgaagaaattattgagaactacttgggctacttagggatcaagatcgataaagaagccaatgacttcaaaggtgaggagaagatcatttcaacgcccgattccaaagtgattgcgatggtagttccgaccaacgaggagctcatgatcgccaaagacacgaaagaaatcattgagaaagggttggacgagcttaagatc

SEQ ID NO: 1232 - protein, 417 aa, synthetic construct
  REGION 1..417: note = variant of acetate kinase from Marinitoga sp.38H-ov
MHHHHHHGGSGMKVLVINSGSSSIKYQLLDMTNEKVLAKGLVERIGIDGSRIVHKVNGEGHVLEHEIKNHEIGLKLVLDLLTDEKYGVLKDLKEIDAVGHRVVHGGERFASSVKITDEVLKTIETLSFLAPLHNPANIMGIKSSMKVLPGVPQVAVFDTAFHQKMPEKAYLYAIPYEYYEKYKIRRYGFHGTSHRYVSKRAAEIMGKPYDQLKIITVHVGNGASVAAVKNGVSVDTSMGFTPLEGLVMGTRSGDIDPAIVSFLEKEEGLSAKEVVNILNKKSGVYGLTKGFSRDMRDIVLKAIEGDPVCRLALDVYYYRIAKYIGAYAAAMNGVDAIVFTAGVGENSPIMREEIIENYLGYLGIKIDKEANDFKGEEKIISTPDSKVIAMVVPTNEELMIAKDTKEIIEKGLDELKI

SEQ ID NO: 1233 - DNA, 1251 bp, synthetic construct
  misc_feature 1..1251: note = variant of acetate kinase from Marinitoga sp.38H-ov
  source 1..1251: mol_type = other DNA
atgcaccatcatcatcatcatggcggtagcggcatgtctgttctggtgattaattctggtagctcctccatcaaatatcagctcctcgatatgaccaacgaaaaggtattagcgaaaggcttggtcgagcgcattggcatcgacggttcgcgtatcgtgcataaagttaacggcgaagggcacgtgctggaacatgagattaaaaatcacgaaattggacttaaattggtcctggatcttcttacggacgaaaaatacggtgtgttgaaggatctcaaagaaatcgatgcagttgggcatcgcgtagtacatggcggcgagcgttttgccagtagcgtgaagattactgacgaagtcttaaagaccatcgagacgttgtcgttcttagctccgttacacaatccagcgaacattatgggtatcaagagcagcatgaaagtgttaccgggtgtgcctcaagttgccgtctttgatacagcgttccaccagaagatgccggagaaagcctatttgtacgcaatcccctatgagtactacgagaaatataaaattcgccgctatgggtttcatggaacctcacatcgttatgtgagtaaacgtgctgcggaaattatgggcaaaccgtacgatcagctcaagatcattaccgttcacgtgggtaacggcgcatcagttgcggcggtgaagaatggcgtatctgttgacacttccatgggtttcacaccacttgaaggtcttgtcatgggcacgcgcagcggcgatattgatccggccatcgtggaatttcttgagaaagaagaaggattgtcggccaaagaagtcgtcaacatcctcaacaagaaatctggtgtgtatgggctcaccaaaggctttagtagggacatgcgtgacattgtgctgaaggctattgaaggtgatcctgtatgccgccttgcattagatgtgtattattatcgtatcgcgaaatatattggcgcatacgctgcggccatgaacggtgttgacgcgatcgtctttaccgcaggagttggcgaaaatagcccgattatgcgcgaagaaattattgagaactacttgggctacttagggatcaagatcgataaagaagccaatgacttcaaaggtgaggagaagatcatttcaacgcccgattccaaagtgattgcgatggtagttccgaccaacgaggagctcatgatcgccaaagacacgaaagaaatcattgagaaagggttggacgagcttaagatc

SEQ ID NO: 1234 - protein, 417 aa, synthetic construct
  REGION 1..417: note = variant of acetate kinase from Marinitoga sp.38H-ov
MHHHHHHGGSGMSVLVINSGSSSIKYQLLDMTNEKVLAKGLVERIGIDGSRIVHKVNGEGHVLEHEIKNHEIGLKLVLDLLTDEKYGVLKDLKEIDAVGHRVVHGGERFASSVKITDEVLKTIETLSFLAPLHNPANIMGIKSSMKVLPGVPQVAVFDTAFHQKMPEKAYLYAIPYEYYEKYKIRRYGFHGTSHRYVSKRAAEIMGKPYDQLKIITVHVGNGASVAAVKNGVSVDTSMGFTPLEGLVMGTRSGDIDPAIVEFLEKEEGLSAKEVVNILNKKSGVYGLTKGFSRDMRDIVLKAIEGDPVCRLALDVYYYRIAKYIGAYAAAMNGVDAIVFTAGVGENSPIMREEIIENYLGYLGIKIDKEANDFKGEEKIISTPDSKVIAMVVPTNEELMIAKDTKEIIEKGLDELKI

SEQ ID NO: 1235 - DNA, 1251 bp, synthetic construct
  misc_feature 1..1251: note = variant of acetate kinase from Marinitoga sp.38H-ov
  source 1..1251: mol_type = other DNA
atgcaccatcatcatcatcatggcggtagcggcatgaaagttctggtgattaattctggtagctcctccatcaaatatcagctcctcgatatgaccaacgaaaaggtattagcgaaaggcttggtcgagcgcattggcatcgacggttcgcgtatcgtgcataaagttaacggcgaagggcacgtgctggaacatgagattaaaaatcacgaaattggacttaaattggtcctggatcttcttacggacgaaaaatacggtgtgttgaaggatctcaaagaaatcgatgcagttgggcatcgcgtagtacatggcggcgagcgttttgccagtagcgtgaagattactgacgaagtcttaaagaccatcgagacgttgtcgttcttagctccgttacacaatccagcgaacattatgggtatcaagagcagcatgaaagtgttaccgggtgtgcctcaagttgccgtctttgatacagcgttccaccagaagatgccggagaaagcctatttgtacgcaatcccctatgagtactacgagaaatataaaattcgccgctatgggtttcatggaacctcacatcgttatgtgagtaaacgtgctgcggaaattatgggcaaaccgtacgatcagctcaagatcattaccgttcacgtgggtaacggcgcatcagttgcggcggtgaagaatggcgtatctgttgacacttccatgggtttcacaccacttgaaggtcttgtcatgggcacgcgcagcggcgatattgatccggccatcgtggaatttcttgagaaagaagaaggattgtcggccaaagaagtcgtcaacatcctcaacaagaaatctggtgtgtatgggctcaccaaaggctttagtagggacatgcgtgacattgtgctgaaggctattgaaggtgatcctgtatgccgccttgcattagatgtgtattattatcgtatcgcgaaatatattggcgcatacgctgcggccatgaacggtgttgacgcgatcgtctttaccgcaggagttggcgaaaatagcccgattatgcgcgaagaaattattgagaactacttgggctacttagggatcaagatcgataaagaacataatgacttcaaaggtgaggagaagatcatttcaacgcccgattccaaagtgattgcgatggtagttccgaccaacgaggagctcatgatcgccaaagacacgaaagaaatcattgagaaagggttggacgagcttaagatc

SEQ ID NO: 1236 - protein, 417 aa, synthetic construct
  REGION 1..417: note = variant of acetate kinase from Marinitoga sp.38H-ov
MHHHHHHGGSGMKVLVINSGSSSIKYQLLDMTNEKVLAKGLVERIGIDGSRIVHKVNGEGHVLEHEIKNHEIGLKLVLDLLTDEKYGVLKDLKEIDAVGHRVVHGGERFASSVKITDEVLKTIETLSFLAPLHNPANIMGIKSSMKVLPGVPQVAVFDTAFHQKMPEKAYLYAIPYEYYEKYKIRRYGFHGTSHRYVSKRAAEIMGKPYDQLKIITVHVGNGASVAAVKNGVSVDTSMGFTPLEGLVMGTRSGDIDPAIVEFLEKEEGLSAKEVVNILNKKSGVYGLTKGFSRDMRDIVLKAIEGDPVCRLALDVYYYRIAKYIGAYAAAMNGVDAIVFTAGVGENSPIMREEIIENYLGYLGIKIDKEHNDFKGEEKIISTPDSKVIAMVVPTNEELMIAKDTKEIIEKGLDELKI

SEQ ID NO: 1237 - DNA, 1251 bp, synthetic construct
  misc_feature 1..1251: note = variant of acetate kinase from Marinitoga sp.38H-ov
  source 1..1251: mol_type = other DNA
atgcaccatcatcatcatcatggcggtagcggcatgaaagttctggtgattaattctggtagctcctccatcaaatatcagctcctcgatatgaccaacgaaaaggtattagcgaaaggcttggtcgagcgcattggcatcgacggttcgcgtatcgtgcataaagttaacggcgaagggcacgtgctggaacatgagattaaaaatcacgaaattggacttaaattggtcctggatcttcttacggacgaaaaatacggtgtgttgaaggatctcaaagaaatcgatgcagttgggcatcgcgtagtacatggcggcgagcgttttgccagtagcgtgaagattatggacgaagtcttaaagaccatcgagacgttgtcgttcttagctccgttacacaatccagcgaacattatgggtatcaagagcagcatgaaagtgttaccgggtgtgcctcaagttgccgtctttgatacagcgttccaccagaagatgccggagaaagcctatttgtacgcaatcccctatgagtactacgagaaatataaaattcgccgctatgggtttcatggaacctcacatcgttatgtgagtaaacgtgctgcggaaattatgggcaaaccgtacgatcagctcaagatcattaccgttcacgtgggtaacggcgcatcagttgcggcggtgaagaatggcgtatctgttgacacttccatgggtttcacaccacttgaaggtcttgtcatgggcacgcgcagcggcgatattgatccggccatcgtggaatttcttgagaaagaagaaggattgtcggccaaagaagtcgtcaacatcctcaacaagaaatctggtgtgtatgggctcaccaaaggctttagtagggacatgcgtgacattgtgctgaaggctattgaaggtgatcctgtatgccgccttgcattagatgtgtattattatcgtatcgcgaaatatattggcgcatacgctgcggccatgaacggtgttgacgcgatcgtctttaccgcaggagttggcgaaaatagcccgattatgcgcgaagaaattattgagaactacttgggctacttagggatcaagatcgataaagaagccaatgacttcaaaggtgaggagaagatcatttcaacgcccgattccaaagtgattgcgatggtagttccgaccaacgaggagctcatgatcgccaaagacacgaaagaaatcattgagaaagggttggacgagcttaagatc

SEQ ID NO: 1238 - protein, 417 aa, synthetic construct
  REGION 1..417: note = variant of acetate kinase from Marinitoga sp.38H-ov
MHHHHHHGGSGMKVLVINSGSSSIKYQLLDMTNEKVLAKGLVERIGIDGSRIVHKVNGEGHVLEHEIKNHEIGLKLVLDLLTDEKYGVLKDLKEIDAVGHRVVHGGERFASSVKIMDEVLKTIETLSFLAPLHNPANIMGIKSSMKVLPGVPQVAVFDTAFHQKMPEKAYLYAIPYEYYEKYKIRRYGFHGTSHRYVSKRAAEIMGKPYDQLKIITVHVGNGASVAAVKNGVSVDTSMGFTPLEGLVMGTRSGDIDPAIVEFLEKEEGLSAKEVVNILNKKSGVYGLTKGFSRDMRDIVLKAIEGDPVCRLALDVYYYRIAKYIGAYAAAMNGVDAIVFTAGVGENSPIMREEIIENYLGYLGIKIDKEANDFKGEEKIISTPDSKVIAMVVPTNEELMIAKDTKEIIEKGLDELKI

SEQ ID NO: 1239 - DNA, 1251 bp, synthetic construct
  misc_feature 1..1251: note = variant of acetate kinase from Marinitoga sp.38H-ov
  source 1..1251: mol_type = other DNA
atgcaccatcatcatcatcatggcggtagcggcatgaaagttctggtgattaattctggtagctcctccatcaaatatcagctcctcgatatgaccaacgaaaaggtattagcgaaaggcttggtcgaacgcattggcatcgacggttcgcgtatcgtgcataaagttaacggcgaagggcacgtgctggaacatgagattaaaaatcacgaaattggacttaaattggtcctggatcttcttacggacgaaaaatacggtgtgttgaaggatctcaaagaaatcgatgcagttgggcatcgcgtagtacatggcggcgagcgttttgccagtagcgtgaagattactgacgaagtcttaaagaccatcgagacgttgtcgttcttagctccgttacacaatccagcgaacattatgggtatcaagagcagcatgaaagtgttaccgggtgtgcctcaagttgccgtctttgatacagcgttccaccagaagatgccggagaaagcctatttgtacgcaatcccctatgagtactacgagaaatataaaattcgccgctatgggtttcatggaacctcacatcgttatgtgagtaaacgtgctgcggaaattatgggcaaaccgtacgatcagctcaagatcattaccgttcacgtgggtaacggcgcatcagttgcggcggtgaagaatggcgtatctgttgacacttccatgggtttcacaccacttgaaggtcttgtcatgggcacgcgcagcggcgatattgatccggccatcgtggaatttcttgagaaagaagaaggattgtcggccaaagaagtcgtcaacatcctctggaagaaatctggtgtgtatgggctcaccaaaggctttagtagggacatgcgtgacattgtgctgaaggctattgaaggtgatcctgtatgccgccttgcattagatgtgtattattatcgtatcgcgaaatatattggcgcatacgctgcggccatgaacggtgttgacgcgatcgtctttaccgcaggagttggcgaaaatagcccgattatgcgcgaagaaattattgagaactacttgggctacttagggatcaagatcgataaagaagccaatgacttcaaaggtgaggagaagatcatttcaacgcccgattccaaagtgattgcgatggtagttccgaccaacgaggagctcatgatcgccaaagacacgaaagaaatcattgagaaagggttggacgagcttaagatc

SEQ ID NO: 1240 - protein, 417 aa, synthetic construct
  REGION 1..417: note = variant of acetate kinase from Marinitoga sp.38H-ov
MHHHHHHGGSGMKVLVINSGSSSIKYQLLDMTNEKVLAKGLVERIGIDGSRIVHKVNGEGHVLEHEIKNHEIGLKLVLDLLTDEKYGVLKDLKEIDAVGHRVVHGGERFASSVKITDEVLKTIETLSFLAPLHNPANIMGIKSSMKVLPGVPQVAVFDTAFHQKMPEKAYLYAIPYEYYEKYKIRRYGFHGTSHRYVSKRAAEIMGKPYDQLKIITVHVGNGASVAAVKNGVSVDTSMGFTPLEGLVMGTRSGDIDPAIVEFLEKEEGLSAKEVVNILWKKSGVYGLTKGFSRDMRDIVLKAIEGDPVCRLALDVYYYRIAKYIGAYAAAMNGVDAIVFTAGVGENSPIMREEIIENYLGYLGIKIDKEANDFKGEEKIISTPDSKVIAMVVPTNEELMIAKDTKEIIEKGLDELKI

SEQ ID NO: 1241 - DNA, 1251 bp, synthetic construct
  misc_feature 1..1251: note = variant of acetate kinase from Marinitoga sp.38H-ov
  source 1..1251: mol_type = other DNA
atgcaccatcatcatcatcatggcggtagcggcatgaaagttctggtgattaatcagggtagccgctccatcaaatatcagctcctcgatatgaccaacgaaaaggtattagcgaaaggcttggtcgaacgcattggcatcgacggttcgcgtatcgtgcataaagttaacggcgaagggcacgtgctggaacatgagattaaaaatcacgaaattggacttaaattggtcctggatcttcttacggacgaaaaatacggtgtgttgaaggatctcaaagaaatcgatgcagttgggcatcgcgtagtacatggcggcgagcgttttgccagtagcgtgaagattactgacgaagtcttaaagaccatcgagacgttgtcgttcttagctccgttacacaatccagcgaacattatgggtatcaagagcagcatgaaagtgttaccgggtgtgcctcaagttgccgtctttgatacagcgttccaccagaagatgccggagaaagcctatttgtacgcaatcccctatgagtactacgagaaatataaaattcgccgctatgggtttcatggaacctcacatcgttatgtgagtaaacgtgctgcggaaattatgggcaaaccgtacgatcagctcaagatcattaccgttcacgtgggtaacggcgcatcagttgcggcggtgaagaatggcgtatctgttgacacttccatgggtttcacaccacttgaaggtcttgtcatgggcacgcgcagcggcgatattgatccggccatcgtggaatttcttgagaaagaagaaggattgtcggccaaagaagtcgtcaacatcctctggaagaaatctggtgtgcgcgggctcaccaaaggctttagtagggacatgcgtgatattgtgcggaaggctattgaaggtgatcctgtatgccgccttgcattagatgtgtattattatcgtatcgcgaaatatattggcgcatacgctgcggccatgaacggtgttgacgcgatcgtctttaccgcaggagttggcgaaaatagcccgattatgcgcgaagaaattattgagaactacttgggctacttagggatcaagatcgataaagaagccaatgacttcaaaggtgaggagaagatcatttcaacgcccgattccaaagtgattgcgatggtagttccgaccaacgaggagctgatgatcgccaaagacacgaaagaaatcattgagaaagggttggacgagcttaagatc

SEQ ID NO: 1242 - protein, 417 aa, synthetic construct
  REGION 1..417: note = variant of acetate kinase from Marinitoga sp.38H-ov
MHHHHHHGGSGMKVLVINQGSRSIKYQLLDMTNEKVLAKGLVERIGIDGSRIVHKVNGEGHVLEHEIKNHEIGLKLVLDLLTDEKYGVLKDLKEIDAVGHRVVHGGERFASSVKITDEVLKTIETLSFLAPLHNPANIMGIKSSMKVLPGVPQVAVFDTAFHQKMPEKAYLYAIPYEYYEKYKIRRYGFHGTSHRYVSKRAAEIMGKPYDQLKIITVHVGNGASVAAVKNGVSVDTSMGFTPLEGLVMGTRSGDIDPAIVEFLEKEEGLSAKEVVNILWKKSGVRGLTKGFSRDMRDIVRKAIEGDPVCRLALDVYYYRIAKYIGAYAAAMNGVDAIVFTAGVGENSPIMREEIIENYLGYLGIKIDKEANDFKGEEKIISTPDSKVIAMVVPTNEELMIAKDTKEIIEKGLDELKI

SEQ ID NO: 1243 - DNA, 1251 bp, synthetic construct
  misc_feature 1..1251: note = variant of acetate kinase from Marinitoga sp.38H-ov
  source 1..1251: mol_type = other DNA
atgcaccatcatcatcatcatggcggtagcggcatgaaagttctggtgattaattctggtagctcctccatcaaatatcagctcctcgatatgaccaacgaaaaggtattagcgaaaggcttggtcgaacgcattggcatcgacggttcgcgtatcgtgcataaagttaacggcgaagggcacgtgctggaacatgagattaaaaatcacgaaattggacttaaattggtcctggatcttcttacggacgaaaaatacggtgtgttgaaggatctcaaagaaatcgatgcagttgggcatcgcgtagtacatggcggcgagcgttttgccagtagcgtgaagattactgacgaagtcttaaagaccatcgagacgttgtcgttcttagctccgttacacaatccagcgaacattatgggtatcaagagcagcatgaaagtgttaccgggtgtgcctcaagttgccgtctttgatacagcgttccaccagaagatgccggagaaagcctatttgtacgcaatcccctatgagtactacgagaaatataaaattcgccgctatgggtttcatggaacctcacatcgttatgtgagtaaacgtgctgcggaaattatgggcaaaccgtacgatcagctcaagatcattaccgttcacgtgggtaacggcgcatcagttgcggcggtgaagaatggcgtatctgttgacacttccatgggtttcacaccacttgaaggtcttgtcatgggcacgcgcagcggcgatattgatccggccatcgtggaatttcttgagaaagaagaaggattgtcggccaaagaagtcgtcaacatcctctggaagaaatctggtgtgcgcgggctcaccaaaggctttagtagggacatgcgtctgattgtgctgaaggctattgaaggtgatcctgtatgccgccttgcattagatgtgtattattatcgtatcgcgaaatatattggcgcatacgctgcggccatgaacggtgttgacgcgatcgtctttaccgcaggagttggcgaaaatagcccgattatgcgcgaagaaattattgagaactacttgggctacttagggatcaagatcgataaagaagccaatgacttcaaaggtgaggagaagatcatttcaacgcccgattccaaagtgattgcgatggtagttccgaccaacgaggagtatatgatcgccaaagacacgaaagaaatcattgagaaagggttggacgagcttaagatc

SEQ ID NO: 1244 - protein, 417 aa, synthetic construct
  REGION 1..417: note = variant of acetate kinase from Marinitoga sp.38H-ov
MHHHHHHGGSGMKVLVINSGSSSIKYQLLDMTNEKVLAKGLVERIGIDGSRIVHKVNGEGHVLEHEIKNHEIGLKLVLDLLTDEKYGVLKDLKEIDAVGHRVVHGGERFASSVKITDEVLKTIETLSFLAPLHNPANIMGIKSSMKVLPGVPQVAVFDTAFHQKMPEKAYLYAIPYEYYEKYKIRRYGFHGTSHRYVSKRAAEIMGKPYDQLKIITVHVGNGASVAAVKNGVSVDTSMGFTPLEGLVMGTRSGDIDPAIVEFLEKEEGLSAKEVVNILWKKSGVRGLTKGFSRDMRLIVLKAIEGDPVCRLALDVYYYRIAKYIGAYAAAMNGVDAIVFTAGVGENSPIMREEIIENYLGYLGIKIDKEANDFKGEEKIISTPDSKVIAMVVPTNEEYMIAKDTKEIIEKGLDELKI

SEQ ID NO: 1245 - DNA, 1251 bp, synthetic construct
  misc_feature 1..1251: note = variant of acetate kinase from Marinitoga sp.38H-ov
  source 1..1251: mol_type = other DNA
atgcaccatcatcatcatcatggcggtagcggcatgaaagttctggtgattaattctggtagctcctccatcaaatatcagctcctcgatatgaccaacgaaaaggtattagcgaaaggcttggtcgaacgcattggcatcgacggttcgcgtatcgtgcataaagttaacggcgaagggcacgtgctggaacatgagattaaaaatcacgaaattggacttaaattggtcctggatcttcttacggacgaaaaatacggtgtgttgaaggatctcaaagaaatcgatgcagttgggcatcgcgtagtacatggcggcgagcgttttgccagtagcgtgaagattactgacgaagtcttaaagaccatcgagacgttgttgttcttagctccgttacacaatccagcgaacattatgggtatcaagagcagcatgaaagtgttaccgggtgtgcctcaagttgccgtctttgatacagcgttccaccagaagatgccggagaaagcctatttgtacgcaatcccctatgagtactacgagaaatataacattcgccgctatgggtttcatggaacctcacatcgttatgtgagtaaacgtgctgcggaaattatgggcaaaccgtacgatcagctcaagatcattaccgttcacgtgggtaacggcgcatcagttgcggcggtgaagaatggcgtatctgttgacacttccatgggtttcacaccacttgaaggtcttgtcatgggcacgcgcagcggcgatattgatccggccatcgtggaatttcttgagaaagaagaaggattgtcggccaaagaagtcgtcaacatcctctggaagaaatctggtgtgtatgggctcaccaaaggctttagtagggacatgcgtctgattgtgctgaaggctattgaaggtgatcctgtatgccgccttgcattagatgtgtattattatcgtatcgcgaaatatattggcgcatacgctgcggccatgaacggtgttgacgcgatcgtctttaccgcaggagttggcgaaaatagcccgattatgcgcgaagaaattattgagaactacttgggctacttagggatcaagatcgataaagaagccaatgacttcaaaggtgaggagaagatcatttcaacgcccgattccaaagtgattgcgatggtagttccgaccaacgaggagctgatgatcgccaaagacacgaaagaaatcattgagaaagggttggacgagcttaagatc

SEQ ID NO: 1246 - protein, 417 aa, synthetic construct
  REGION 1..417: note = variant of acetate kinase from Marinitoga sp.38H-ov
MHHHHHHGGSGMKVLVINSGSSSIKYQLLDMTNEKVLAKGLVERIGIDGSRIVHKVNGEGHVLEHEIKNHEIGLKLVLDLLTDEKYGVLKDLKEIDAVGHRVVHGGERFASSVKITDEVLKTIETLLFLAPLHNPANIMGIKSSMKVLPGVPQVAVFDTAFHQKMPEKAYLYAIPYEYYEKYNIRRYGFHGTSHRYVSKRAAEIMGKPYDQLKIITVHVGNGASVAAVKNGVSVDTSMGFTPLEGLVMGTRSGDIDPAIVEFLEKEEGLSAKEVVNILWKKSGVYGLTKGFSRDMRLIVLKAIEGDPVCRLALDVYYYRIAKYIGAYAAAMNGVDAIVFTAGVGENSPIMREEIIENYLGYLGIKIDKEANDFKGEEKIISTPDSKVIAMVVPTNEELMIAKDTKEIIEKGLDELKI

SEQ ID NO: 1247 - DNA, 1251 bp, synthetic construct
  misc_feature 1..1251: note = variant of acetate kinase from Marinitoga sp.38H-ov
  source 1..1251: mol_type = other DNA
atgcaccatcatcatcatcatggcggtagcggcatgaaagttctggtgattaatttgggtagcagctccatcaaatatcagctcctcgatatgaccaacgaaaaggtattagcgaaaggcttggtcgaacgcattggcatcgacggttcgcgtatcgtgcataaagttaacggcgaagggcacgtgctggaacatgagattaaaaatcacgaaattggacttaaattggtcctggatcttcttacggacgaaaaatacggtgtgttgaaggatctcaaagaaatcgatgcagttgggcatcgcgtagtacatggcggcgagcgttttgccagtagcgtgaagattactgacgaagtcttaaagaccatcgagacgttgttgttcttagctccgttacacaatccagcgaacattatgggtatcaagagcagcatgaaagtgttaccgggtgtgcctcaagttgccgtctttgatacagcgttccaccagaagatgccggagaaagcctatttgtacgcaatcccctatgagtactacgagaaatataaaattcgccgctatgggtttcatggaacctcacatcgttatgtgagtaaacgtgctgcggaaattatgggcaaaccgtacgatcagctcaagatcattaccgttcacgtgggtaacggcgcatcagttgcggcggtgaagaatggcgtatctgttgacacttccatgggtttcacaccacttgaaggtcttgtcatgggcacgcgcagcggcgatattgatccggccatcgtggaatttcttgagaaagaagaaggattgtcggccaaagaagtcgtcaacatcctctggaagaaatctggtgtgtatgggctcaccaaaggctttagtagggacatgcgtgacattgtgcggaaggctattgaaggtgatcctgtatgccgccttgcattagatgtgtattattatcgtatcgcgaaatatattggcgcatacgctgcggccatgaacggtgttgacgcgatcgtctttaccgcaggagttggcgaaaatagcccgattatgcgcgaagaaattattgagaactacttgggctacttagggatcaagatcgataaagaagccaatgacttcaaaggtgaggagaagatcatttcaacgcccgattccaaagtgattgcgatggtagttccgaccaacgaggagctgatgatcgccaaagacacgaaagaaatcattgagaaagggttggacgagcttaagatc

SEQ ID NO: 1248 - protein, 417 aa, synthetic construct
  REGION 1..417: note = variant of acetate kinase from Marinitoga sp.38H-ov
MHHHHHHGGSGMKVLVINLGSSSIKYQLLDMTNEKVLAKGLVERIGIDGSRIVHKVNGEGHVLEHEIKNHEIGLKLVLDLLTDEKYGVLKDLKEIDAVGHRVVHGGERFASSVKITDEVLKTIETLLFLAPLHNPANIMGIKSSMKVLPGVPQVAVFDTAFHQKMPEKAYLYAIPYEYYEKYKIRRYGFHGTSHRYVSKRAAEIMGKPYDQLKIITVHVGNGASVAAVKNGVSVDTSMGFTPLEGLVMGTRSGDIDPAIVEFLEKEEGLSAKEVVNILWKKSGVYGLTKGFSRDMRDIVRKAIEGDPVCRLALDVYYYRIAKYIGAYAAAMNGVDAIVFTAGVGENSPIMREEIIENYLGYLGIKIDKEANDFKGEEKIISTPDSKVIAMVVPTNEELMIAKDTKEIIEKGLDELKI

SEQ ID NO: 1249 - DNA, 1251 bp, synthetic construct
  misc_feature 1..1251: note = variant of acetate kinase from Marinitoga sp.38H-ov
  source 1..1251: mol_type = other DNA
atgcaccatcatcatcatcatggcggtagcggcatgaaagttctggtgattaattctggtagctcctccatcaaatatcagctcctcgatatgcgcaacgaaaaggtattagcgaaaggcttggtcgaacgcattggcatcgacggttcgcgtatcgtgcttaaagttaacggcgaagggcacgtgctggaacatgagattaaaaatcacgaaattggacttaaattggtcctggatcttcttacggacgaaaaatacggtccgttgaaggatctcaaagaaatcgatgcagttgggcatcgcgtagtacatggcggcgagcgttttgccagtagcgtgaagattactgacgaagtcttaaagaccatcgagacgttgtcgttcttagctccgttacacaatccagcgaacattatgggtatcaagagcagcatgaaagtgttaccgggtgtgcctcaagttgccgtctttgatacagcgttccaccagaagatgccggagaaagcctatttgtacgcaatcccctatgagtactacgagaaatataaaattcgccgctatgggtttcatggaacctcacatcgttatgtgagtaaacgtgctgcggaaattatgggcaaaccgctggatcagctcaagatcattaccgttcacgtgggtaacggcgcatcagttgcggcggtgaagaatggcgtatctgttgacacttccatgggtttcacaccacttgaaggtcttgtcatgggcacgcgcagcggcgatattgatccggccatcgtggaatttcttgagaaagaagaaggattgtcggccaaagaagtcgtcaacgcgctctggaagaaatctggtgtgtatgggctcaccaaaggctttagtagggacatgcgtgacattgtgctgaaggctattgaaggtgatcctgtatgccgccttgcattagatgtgtattattatcgtatcgcgaaatatattggcgcatacgctgcggccatgaacggtgttgacgcgatcgtctttaccgcaggagttggcgaaaatagcccgattatgcgcgaagaaattattgagaactacttgggctacttagggatcaagatcgataaagaagccaatgacttcaaaggtgaggagaagatcatttcaacgcccgattccaaagtgattgcgatggtagttccgaccaacgaggagctcatgatcgccaaagacacgaaagaaatcattgagaaagggttggacgagcttaagatc

SEQ ID NO: 1250 - protein, 417 aa, synthetic construct
  REGION 1..417: note = variant of acetate kinase from Marinitoga sp.38H-ov
MHHHHHHGGSGMKVLVINSGSSSIKYQLLDMRNEKVLAKGLVERIGIDGSRIVLKVNGEGHVLEHEIKNHEIGLKLVLDLLTDEKYGPLKDLKEIDAVGHRVVHGGERFASSVKITDEVLKTIETLSFLAPLHNPANIMGIKSSMKVLPGVPQVAVFDTAFHQKMPEKAYLYAIPYEYYEKYKIRRYGFHGTSHRYVSKRAAEIMGKPLDQLKIITVHVGNGASVAAVKNGVSVDTSMGFTPLEGLVMGTRSGDIDPAIVEFLEKEEGLSAKEVVNALWKKSGVYGLTKGFSRDMRDIVLKAIEGDPVCRLALDVYYYRIAKYIGAYAAAMNGVDAIVFTAGVGENSPIMREEIIENYLGYLGIKIDKEANDFKGEEKIISTPDSKVIAMVVPTNEELMIAKDTKEIIEKGLDELKI

SEQ ID NO: 1251 - DNA, 1251 bp, synthetic construct
  misc_feature 1..1251: note = variant of acetate kinase from Marinitoga sp.38H-ov
  source 1..1251: mol_type = other DNA
atgcaccatcatcatcatcatggcggtagcggcatgaaagttctggtgattaattctggtagctcctccatcaaatatcagctcctcgatatgaccaacgaaaaggtattagcgaaaggcttggtcgaacgcattggcatcgacggttcgcgtatcgtgcataaagttaacggcgaagggcacgtgctggaacatgagattaaaaatcacgaaattggacttaaattggtcctggatcttcttacggacgaaaaatacggtgtgttgaaggatctcaaagaaatcgatgcagttgggcatcgcgtagtacatggcggcgagcgttttgccagtagcgtgaagattactgacgaagtcttaaagaccatcgagacgttgtcgttcttagctccgttacacaatccagcgaacattatgggtatcaagagcagcatgaaagtgttaccgggtgtgcctcaagttgccgtctttgatacagcgttccaccagaagatgccggagaaagcctatttgtacgcaatcccctatgagtactacgagaaatataaaattcgccgctatgggtttcatggaacctcacatcgttatgtgagtaaacgtgctgcggaaattatgggcaaaccgtatgatcagctcaagatcattaccgttcacgtgggtaacggcgcatcagttgcggcggtgaagaatggcgtatctgttgacacttccatgggtttcacaccacttgaaggtcttgtcatgggcacgcgcagcggcgatattgatccggccatcgtggaatttcttgagaaagaagaaggattgtcggccaaagaagtcgtcaacgcgctctggaagaaatctggtgtgtatgggctcaccaaaggcccgagtagggacatgcgtgacattgtgctgaaggctattgaaggtgatcctgtatgccgccttgcattagatgtgtattattatcgtatcgcgaaatatattggcgcatacgctgcggccatgaacggtgttgacgcgatcgtctttaccgcaggagttggcgaaaatagcccgattatgcgcgaagaaattattgagaactacttgggctacttagggatcaagatcgataaagaagccaatgacttcaaaggtgaggagaagatcatttcaacgcccgattccaaagtgattgcgatggtagttccgaccaacgaggagctcatgatcgccaaagacacgaaagaaatcattgagaaagggttggacgagcttaagatc

SEQ ID NO: 1252 - protein, 417 aa, synthetic construct
  REGION 1..417: note = variant of acetate kinase from Marinitoga sp.38H-ov
MHHHHHHGGSGMKVLVINSGSSSIKYQLLDMTNEKVLAKGLVERIGIDGSRIVHKVNGEGHVLEHEIKNHEIGLKLVLDLLTDEKYGVLKDLKEIDAVGHRVVHGGERFASSVKITDEVLKTIETLSFLAPLHNPANIMGIKSSMKVLPGVPQVAVFDTAFHQKMPEKAYLYAIPYEYYEKYKIRRYGFHGTSHRYVSKRAAEIMGKPYDQLKIITVHVGNGASVAAVKNGVSVDTSMGFTPLEGLVMGTRSGDIDPAIVEFLEKEEGLSAKEVVNALWKKSGVYGLTKGPSRDMRDIVLKAIEGDPVCRLALDVYYYRIAKYIGAYAAAMNGVDAIVFTAGVGENSPIMREEIIENYLGYLGIKIDKEANDFKGEEKIISTPDSKVIAMVVPTNEELMIAKDTKEIIEKGLDELKI

SEQ ID NO: 1253 - DNA, 1251 bp, synthetic construct
  misc_feature 1..1251: note = variant of acetate kinase from Marinitoga sp.38H-ov
  source 1..1251: mol_type = other DNA
atgcaccatcatcatcatcatggcggtagcggcatgaaagttctggtgattaattctggtagctcctccatcaaatatcagctcctcgatatgaccaacgaaaaggtattagcgaaaggcttggtcgaacgcattggcatcgacggttcgcgtatcgtgcataaagttaacggcgaagggcacgtgctggaacatgagattaaaaatcacgaaattggacttaaattggtcctggatcttcttacggacgaaaaatacggtgtgttgaaggatctcaaagaaatcgatgcagttgggcatcgcgtagtacatggcggcgagcgttttgccagtagcgtgaagattactgacgaagtcttaaagaccatcgagacgttgttgttcttagctccgttacacaatccagcgaacattatgggtatcaagagcagcatgaaagtgttaccgggtgtgcctcaagttgccgtctttgatacagcgttccaccagaagatgccggagaaagcctatttgtacgcaatcccctatgagtactacgagaaatataacattcgccgctatgggtttcatggaacctcacatcgttatgtgagtaaacgtgctgcggaaattatgggcaaaccgtacgatcagctcaagatcattaccgttcacgtgggtaacggcgcatcagttgcggcggtgaagaatggcgtatctgttgacacttccatgggtttcacaccacttgaaggtcttgtcatgggcacgcgcagcggcgatattgatccggccatcgtggaatttcttgagaaagaagaaggattgtcggccaaagaagtcgtcaacatcctctggaagaaatctggtgtgtatgggctcaccaaaggctttagtagggacatgcgtgacattgtgcggaaggctattgaaggtgatcctgtatgccgccttgcattagatgtgtattattatcgtatcgcgaaatatattggcgcatacgctgcggccatgaacggtgttgacgcgatcgtctttaccgcaggagttggcgaaaatagcccgattatgcgcgaagaaattattgagaactacttgggctacttagggatcaagatcgataaagaagccaatgacttcaaaggtgaggagaagatcatttcaacgcccgattccaaagtgattgcgatggtagttccgaccaacgaggagtatatgatcgccaaagacacgaaagaaatcattgagaaagggttggacgagcttaagatc

SEQ ID NO: 1254 - protein, 417 aa, synthetic construct
  REGION 1..417: note = variant of acetate kinase from Marinitoga sp.38H-ov
MHHHHHHGGSGMKVLVINSGSSSIKYQLLDMTNEKVLAKGLVERIGIDGSRIVHKVNGEGHVLEHEIKNHEIGLKLVLDLLTDEKYGVLKDLKEIDAVGHRVVHGGERFASSVKITDEVLKTIETLLFLAPLHNPANIMGIKSSMKVLPGVPQVAVFDTAFHQKMPEKAYLYAIPYEYYEKYNIRRYGFHGTSHRYVSKRAAEIMGKPYDQLKIITVHVGNGASVAAVKNGVSVDTSMGFTPLEGLVMGTRSGDIDPAIVEFLEKEEGLSAKEVVNILWKKSGVYGLTKGFSRDMRDIVRKAIEGDPVCRLALDVYYYRIAKYIGAYAAAMNGVDAIVFTAGVGENSPIMREEIIENYLGYLGIKIDKEANDFKGEEKIISTPDSKVIAMVVPTNEEYMIAKDTKEIIEKGLDELKI

SEQ ID NO: 1255 - DNA, 1251 bp, synthetic construct
  misc_feature 1..1251: note = variant of acetate kinase from Marinitoga sp.38H-ov
  source 1..1251: mol_type = other DNA
atgcaccatcatcatcatcatggcggtagcggcatgaaagttctggtgattaatcagggtagccgctccatcaaatatcagctcctcgatatgaccaacgaaaaggtattagcgaaaggcttggtcgaacgcattggcatcgacggttcgcgtatcgtgcataaagttaacggcgaagggcacgtgctggaacatgagattaaaaatcacgaaattggacttaaattggtcctggatcttcttacggacgaaaaatacggtgtgttgaaggatctcaaagaaatcgatgcagttgggcatcgcgtagtacatggcggcgagcgttttgccagtagcgtgaagattactgacgaagtcttaaagaccatcgagacgttgtcgttcttagctccgttacacaatccagcgaacattatgggtatcaagagcagcatgaaagtgttaccgggtgtgcctcaagttgccgtctttgatacagcgttccaccagaagatgccggagaaagcctatttgtacgcaatcccctatgagtactacgagaaatataaaattcgccgctatgggtttcatggaacctcacatcgttatgtgagtaaacgtgctgcggaaattatgggcaaaccgtacgatcagctcaagatcattaccgttcacgtgggtaacggcgcatcagttgcggcggtgaagaatggcgtatctgttgacacttccatgggtttcacaccacttgaaggtcttgtcatgggcacgcgcagcggcgatattgatccggccatcgtggaatttcttgagaaagaagaaggattgtcggccaaagaagtcgtcaacatcctctggaagaaatctggtgtgtatgggctcaccaaaggctttagtagggacatgcgtgacattgtgctgaaggctattgaaggtgatcctgtatgccgccttgcattagatgtgtattattatcgtatcgcgaaatatattggcgcatacgctgcggccatgaacggtgttgacgcgatcgtctttaccgcaggagttggcgaaaatagcccgattatgcgcgaagaaattattgagaactacttgggctacttagggatcaagatcgataaagaagccaatgacttcaaaggtgaggagaagatcatttcaacgcccgattccaaagtgattgcgatggtagttccgaccaacgaggagtatatgatcgccaaagacacgaaagaaatcattgagaaagggttggacgagcttaagatc

SEQ ID NO: 1256 - protein, 417 aa, synthetic construct
  REGION 1..417: note = variant of acetate kinase from Marinitoga sp.38H-ov
MHHHHHHGGSGMKVLVINQGSRSIKYQLLDMTNEKVLAKGLVERIGIDGSRIVHKVNGEGHVLEHEIKNHEIGLKLVLDLLTDEKYGVLKDLKEIDAVGHRVVHGGERFASSVKITDEVLKTIETLSFLAPLHNPANIMGIKSSMKVLPGVPQVAVFDTAFHQKMPEKAYLYAIPYEYYEKYKIRRYGFHGTSHRYVSKRAAEIMGKPYDQLKIITVHVGNGASVAAVKNGVSVDTSMGFTPLEGLVMGTRSGDIDPAIVEFLEKEEGLSAKEVVNILWKKSGVYGLTKGFSRDMRDIVLKAIEGDPVCRLALDVYYYRIAKYIGAYAAAMNGVDAIVFTAGVGENSPIMREEIIENYLGYLGIKIDKEANDFKGEEKIISTPDSKVIAMVVPTNEEYMIAKDTKEIIEKGLDELKI

SEQ ID NO: 1257 - DNA, 1251 bp, synthetic construct
  misc_feature 1..1251: note = variant of acetate kinase from Marinitoga sp.38H-ov
  source 1..1251: mol_type = other DNA
atgcaccatcatcatcatcatggcggtagcggcatgaaagtgctggtgattaattctggtagctcctccatcaaatatcagctcctcgatatgcgcaacgaaaaggtattagcgaaaggcttggtcgaacgcattggcatcgacggttcgcgtatcgtgcttaaagttaacggcgaagggcacgtgctggaacatgagattaaaaatcacgaaattggacttaaattggtcctggatcttcttacggacgaaaaatacggtgtgttgaaggatctcaaagaaatcgatgcagttgggcatcgcgtagtacatggcggcgagcgttttgccagtagcgtgaagattactgacgaagtcttaaagaccatcgagacgttgtcgttcttagctccgttacacaatccagcgaacattatgggtatcaagagcagcatgaaagtgttaccgggtgtgcctcaagttgccgtctttgatacagcgttccaccagaagatgccggagaaagcctatttgtacgcaatcccctatgagtactacgagaaatataaaattcgccgctatgggtttcatggaacctcacatcgttatgtgagtaaacgtgctgcggaaattatgggcaaaccgcgggatcagctcaagatcattaccgttcacgtgggtaacggcgcatcagttgcggcggtgaagaatggcgtatctgttgacacttccatgggtttcacaccacttgaaggtcttgtcatgggcacgcgcagcggcgatattgatccggccatcgtggaatttcttgagaaagaagaaggattgtcggccaaagaagtcgtcaacgcgctctggaagaaatctggtgtgtatgggctcaccaaaggctttagtagggacatgcgtgacattgtgctgaaggctattgaaggtgatcctgtatgccgccttgcattagatgtgtattattatcgtatcgcgaaatatattggcgcatacgctgcggccatgaacggtgttgacgcgatcgtctttaccgcaggagttggcgaaaatagcccgattatgcgcgaagaaattattgagaactacttgggctacttagggatcaagatcgataaagaagccaatgacttcaaaggtgaggagaagatcatttcaacgcccgattccaaagtgattgcgatggtagttccgaccaacgaggagctcatgatcgccaaagacacgaaagaaatcattgagaaagggttggacgagcttaagatc

SEQ ID NO: 1258 - protein, 417 aa, synthetic construct
  REGION 1..417: note = variant of acetate kinase from Marinitoga sp.38H-ov
MHHHHHHGGSGMKVLVINSGSSSIKYQLLDMRNEKVLAKGLVERIGIDGSRIVLKVNGEGHVLEHEIKNHEIGLKLVLDLLTDEKYGVLKDLKEIDAVGHRVVHGGERFASSVKITDEVLKTIETLSFLAPLHNPANIMGIKSSMKVLPGVPQVAVFDTAFHQKMPEKAYLYAIPYEYYEKYKIRRYGFHGTSHRYVSKRAAEIMGKPRDQLKIITVHVGNGASVAAVKNGVSVDTSMGFTPLEGLVMGTRSGDIDPAIVEFLEKEEGLSAKEVVNALWKKSGVYGLTKGFSRDMRDIVLKAIEGDPVCRLALDVYYYRIAKYIGAYAAAMNGVDAIVFTAGVGENSPIMREEIIENYLGYLGIKIDKEANDFKGEEKIISTPDSKVIAMVVPTNEELMIAKDTKEIIEKGLDELKI

SEQ ID NO: 1259 - DNA, 1251 bp, synthetic construct
  misc_feature 1..1251: note = variant of acetate kinase from Marinitoga sp.38H-ov
  source 1..1251: mol_type = other DNA
atgcaccatcatcatcatcatggcggtagcggcatgaaagttctggtgattaattctggtagctcctccatcaaatatcagctcctcgatatgaccaacgaaaaggtattagcgaaaggcttggtcgaacgcattggcatcgacggttcgcgtatcgtgcataaagttaacggcgaagggcacgtgctggaacatgagattaaaaatcacgaaattggacttaaattggtcctggatcttcttacggacgaaaaatacggtgtgttgaaggatctcaaagaaatcgatgcagttgggcatcgcgtagtacatggcggcgagcgttttgccagtagcgtgaagattactgacgaagtcttaaagaccatcgagacgttgtcgttcttagctccgttacacaatccagcgaacattatgggtatcaagagcagcatgaaagtgttaccgggtgtgcctcaagttgccgtctttgatacagcgttccaccagaagatgccggagaaagcctatttgtacgcaatcccctatgagtactacgagaaatataaaattcgccgctatgggtttcatggaacctcacatcgttatgtgagtaaacgtgctgcggaaattatgggcaaaccgtacgatcagctcaagatcattaccgttcacgtgggtaacggcgcatcagttgcggcggtgaagaatggcgtatctgttgacacttccatgggtttcacaccacttgaaggtcttgtcatgggcacgcgcagcggcgatattgatccggccatcgtggaatttcttgagaaagaagaaggattgtcggccaaagaagtcgtcaacatcctctggaagaaatctggtgtgtatgggctcaccaaaggctttagtagggacatgcgtgatattgtgctgaaggctattgaaggtgatcctgtatgccgccttgcattagatgtgtattattatcgtatcgcgaaatatattggcgcatacgctgcggccatgaacggtgttgacgcgatcgtctttaccgcaggagttggcgaaaatagcccgattatgcgcgaagaaattattgagaactacttgggctacttagggatcaagatcgataaagaagccaatgacttcaaaggtgaggagaagatcatttcaacgcccgattccaaagtgattgcgatggtagttccgaccaacgaggagtatatgatcgccaaagacacgaaagaaatcattgagaaagggttggacgagcttaagatc

SEQ ID NO: 1260 - protein, 417 aa, synthetic construct
  REGION 1..417: note = variant of acetate kinase from Marinitoga sp.38H-ov
MHHHHHHGGSGMKVLVINSGSSSIKYQLLDMTNEKVLAKGLVERIGIDGSRIVHKVNGEGHVLEHEIKNHEIGLKLVLDLLTDEKYGVLKDLKEIDAVGHRVVHGGERFASSVKITDEVLKTIETLSFLAPLHNPANIMGIKSSMKVLPGVPQVAVFDTAFHQKMPEKAYLYAIPYEYYEKYKIRRYGFHGTSHRYVSKRAAEIMGKPYDQLKIITVHVGNGASVAAVKNGVSVDTSMGFTPLEGLVMGTRSGDIDPAIVEFLEKEEGLSAKEVVNILWKKSGVYGLTKGFSRDMRDIVLKAIEGDPVCRLALDVYYYRIAKYIGAYAAAMNGVDAIVFTAGVGENSPIMREEIIENYLGYLGIKIDKEANDFKGEEKIISTPDSKVIAMVVPTNEEYMIAKDTKEIIEKGLDELKI

SEQ ID NO: 1261 - DNA, 1251 bp, synthetic construct
  misc_feature 1..1251: note = variant of acetate kinase from Marinitoga sp.38H-ov
  source 1..1251: mol_type = other DNA
atgcaccatcatcatcatcatggcggtagcggcatgaaagtgctgagcattaattctggtagctcctccatcaaatatcagatcctcgatatgaccaacgaaaaggtattagcgaaaggcttggtcgaacgcattggcatcgacggttcgcgtatcgtgcttaaagttaacggcgaagggcacgtgctggaacatgagattaaaaatcacgaaattggacttaaattggtcctggatcttcttacggacgaaaaatacggtgtgttgaaggatctcaaagaaatcgatgcagttgggcatcgcgtagtacatggcggcgagcgttttgccagtagcgtgaagattactgacgaagtcttaaagaccatcgagacgttgtcgttcttagctccgttacacaatccagcgaacattatgggtatcaagagcagcatgaaagtgttaccgggtgtgcctcaagttgccgtctttgatacagcgttccaccagaagatgccggagaaagcctatttgtacgcaatcccctatgagtactacgagaaatataaaattcgccgctatgggtttcatggaacctcacatcgttatgtgagtaaacgtgctgcggaaattatgggcaaaccgtatgatcagctcaagatcattaccgttcacgtgggtaacggcgcatcagttgcggcggtgaagaatggcgtatctgttgacacttccatgggtttcacaccacttgaaggtcttgtcatgggcacgcgcagcggcgatattgatccggccatcgtggaatttcttgagaaagaagaaggattgtcggccaaagaagtcgtcaacatcctctggaagaaatctggtgtgtatgggctcaccaaaggctttagtagggacatgcgtgacattgtgctgaaggctattgaaggtgatcctgtatgccgccttgcattagatgtgtattattatcgtatcgcgaaatatattggcgcatacgctgcggccatgaacggtgttgacgcgatcgtctttaccgcaggagttggcgaaaatagcccgattatgcgcgaagaaattattgagaactacttgggctacttagggatcaagatcgataaagaagccaatgacttcaaaggtgaggagaagatcatttcaacgcccgattccaaagtgattgcgatggtagttccgaccaacgaggagctcatgatcgccaaagacacgaaagaaatcattgagaaagggttggacgagcttaagatc

SEQ ID NO: 1262 - protein, 417 aa, synthetic construct
  REGION 1..417: note = variant of acetate kinase from Marinitoga sp.38H-ov
MHHHHHHGGSGMKVLSINSGSSSIKYQILDMTNEKVLAKGLVERIGIDGSRIVLKVNGEGHVLEHEIKNHEIGLKLVLDLLTDEKYGVLKDLKEIDAVGHRVVHGGERFASSVKITDEVLKTIETLSFLAPLHNPANIMGIKSSMKVLPGVPQVAVFDTAFHQKMPEKAYLYAIPYEYYEKYKIRRYGFHGTSHRYVSKRAAEIMGKPYDQLKIITVHVGNGASVAAVKNGVSVDTSMGFTPLEGLVMGTRSGDIDPAIVEFLEKEEGLSAKEVVNILWKKSGVYGLTKGFSRDMRDIVLKAIEGDPVCRLALDVYYYRIAKYIGAYAAAMNGVDAIVFTAGVGENSPIMREEIIENYLGYLGIKIDKEANDFKGEEKIISTPDSKVIAMVVPTNEELMIAKDTKEIIEKGLDELKI

SEQ ID NO: 1263 - DNA, 1251 bp, synthetic construct
  misc_feature 1..1251: note = variant of acetate kinase from Marinitoga sp.38H-ov
  source 1..1251: mol_type = other DNA
atgcaccatcatcatcatcatggcggtagcggcatgaaagtgctggtgattaattctggtagctcctccatcaaatatcagctcctcgatatgaccaacgaaaaggtattagcgaaaggcttggtcgaacgcattggcatcgacggttcgcgtatcgtgcataaagttaacggcgaagggcacgtgctggaacatgagattaaaaatcacgaaattggacttaaattggtcctggatcttcttacggacgaaaaatacggtccgttgaaggatctcaaagaaatcgatgcagttgggcatcgcgtagtacatggcggcgagcgttttgccagtagcgtgaagattactgacgaagtcttaaagaccatcgagacgttgtcgttcttagctccgttacacaatccagcgaacattatgggtatcaagagcagcatgaaagtgttaccgggtgtgcctcaagttgccgtctttgatacagcgttccaccagaagatgccggagaaagcctatttgtacgcaatcccctatgagtactacgagaaatataaaattcgccgctatgggtttcatggaacctcacatcgttatgtgagtaaacgtgctgcggaaattatgggcaaaccgctggatcagctcaagatcattaccgttcacgtgggtaacggcgcatcagttgcggcggtgaagaatggcgtatctgttgacacttccatgggtttcacaccacttgaaggtcttgtcatgggcacgcgcagcggcgatattgatccggccatcgtggaatttcttgagaaagaagaaggattgtcggccaaagaagtcgtcaacgcgctctggaagaaatctggtgtgtatgggctcaccaaaggctttagtagggacatgcgtgacattgtgctgaaggctattgaaggtgatcctgtatgccgccttgcattagatgtgtattattatcgtatcgcgaaatatattggcgcatacgctgcggccatgaacggtgttgacgcgatcgtctttaccgcaggagttggcgaaaatagcccgattatgcgcgaagaaattattgagaactacttgggctacttagggatcaagatcgataaagaagccaatgacttcaaaggtgaggagaagatcatttcaacgcccgattccaaagtgattgcgatggtagttccgaccaacgaggagctcatgatcgccaaagacacgaaagaaatcattgagaaagggttggacgagcttaagatc

SEQ ID NO: 1264 - protein, 417 aa, synthetic construct
  REGION 1..417: note = variant of acetate kinase from Marinitoga sp.38H-ov
MHHHHHHGGSGMKVLVINSGSSSIKYQLLDMTNEKVLAKGLVERIGIDGSRIVHKVNGEGHVLEHEIKNHEIGLKLVLDLLTDEKYGPLKDLKEIDAVGHRVVHGGERFASSVKITDEVLKTIETLSFLAPLHNPANIMGIKSSMKVLPGVPQVAVFDTAFHQKMPEKAYLYAIPYEYYEKYKIRRYGFHGTSHRYVSKRAAEIMGKPLDQLKIITVHVGNGASVAAVKNGVSVDTSMGFTPLEGLVMGTRSGDIDPAIVEFLEKEEGLSAKEVVNALWKKSGVYGLTKGFSRDMRDIVLKAIEGDPVCRLALDVYYYRIAKYIGAYAAAMNGVDAIVFTAGVGENSPIMREEIIENYLGYLGIKIDKEANDFKGEEKIISTPDSKVIAMVVPTNEELMIAKDTKEIIEKGLDELKI

SEQ ID NO: 1265 - DNA, 1251 bp, synthetic construct
  misc_feature 1..1251: note = variant of acetate kinase from Marinitoga sp.38H-ov
  source 1..1251: mol_type = other DNA
atgcaccatcatcatcatcatggcggtagcggcatgaaagttctggtgattaattctggtagctcctccatcaaatatcagctcctcgatatgaccaacgaaaaggtattagcgaaaggcttggtcgaacgcattggcatcgacggttcgcgtatcgtgcataaagttaacggcgaagggcacgtgctggaacatgagattaaaaatcacgaaattggacttaaattggtcctggatcttcttacggacgaaaaatacggtgtgttgaaggatctcaaagaaatcgatgcagttgggcatcgcgtagtacatggcggcgagcgttttgccagtagcgtgaagattactgacgaagtcttaaagaccatcgagacgttgttgttcttagctccgttacacaatccagcgaacattatgggtatcaagagcagcatgaaagtgttaccgggtgtgcctcaagttgccgtctttgatacagcgttccaccagaagatgccggagaaagcctatttgtacgcaatcccctatgagtactacgagaaatataaaattcgccgctatgggtttcatggaacctcacatcgttatgtgagtaaacgtgctgcggaaattatgggcaaaccgtacgatcagctcaagatcattaccgttcacgtgggtaacggcgcatcagttgcggcggtgaagaatggcgtatctgttgacacttccatgggtttcacaccacttgaaggtcttgtcatgggcacgcgcagcggcgatattgatccggccatcgtggaatttcttgagaaagaagaaggattgtcggccaaagaagtcgtcaacatcctctggaagaaatctggtgtgtatgggctcaccaaaggctttagtagggacatgcgtctgattgtgctgaaggctattgaaggtgatcctgtatgccgccttgcattagatgtgtattattatcgtatcgcgaaatatattggcgcatacgctgcggccatgaacggtgttgacgcgatcgtctttaccgcaggagttggcgaaaatagcccgattatgcgcgaagaaattattgagaactacttgggctacttagggatcaagatcgataaagaagccaatgacttcaaaggtgaggagaagatcatttcaacgcccgattccaaagtgattgcgatggtagttccgaccaacgaggagctgatgatcgccaaagacacgaaagaaatcattgagaaagggttggacgagcttaagatc

SEQ ID NO: 1266 - protein, 417 aa, synthetic construct
  REGION 1..417: note = variant of acetate kinase from Marinitoga sp.38H-ov
MHHHHHHGGSGMKVLVINSGSSSIKYQLLDMTNEKVLAKGLVERIGIDGSRIVHKVNGEGHVLEHEIKNHEIGLKLVLDLLTDEKYGVLKDLKEIDAVGHRVVHGGERFASSVKITDEVLKTIETLLFLAPLHNPANIMGIKSSMKVLPGVPQVAVFDTAFHQKMPEKAYLYAIPYEYYEKYKIRRYGFHGTSHRYVSKRAAEIMGKPYDQLKIITVHVGNGASVAAVKNGVSVDTSMGFTPLEGLVMGTRSGDIDPAIVEFLEKEEGLSAKEVVNILWKKSGVYGLTKGFSRDMRLIVLKAIEGDPVCRLALDVYYYRIAKYIGAYAAAMNGVDAIVFTAGVGENSPIMREEIIENYLGYLGIKIDKEANDFKGEEKIISTPDSKVIAMVVPTNEELMIAKDTKEIIEKGLDELKI

SEQ ID NO: 1267 - DNA, 1251 bp, synthetic construct
  misc_feature 1..1251: note = variant of acetate kinase from Marinitoga sp.38H-ov
  source 1..1251: mol_type = other DNA
atgcaccatcatcatcatcatggcggtagcggcatgaaaatgctggtgattaattctggtagctcctccatcaaatatcagctcctcgatatgcgcaacgaaaaggtattagcgaaaggcttggtcgaacgcattggcatcgacggttcgcgtatcgtgcataaagttaacggcgaagggcacgtgctggaacatgagattaaaaatcacgaaattggacttaaattggtcctggatcttcttacggacgaaaaatacggtgtgttgaaggatctcaaagaaatcgatgcagttgggcatcgcgtagtacatggcggcgagcgttttgccagtagcgtgaagattactgacgaagtcttaaagaccatcgagacgttgtcgttcttagctccgttacacaatccagcgaacattatgggtatcaagagcagcatgaaagtgttaccgggtgtgcctcaagttgccgtctttgatacagcgttccaccagaagatgccggagaaagcctatttgtacgcaatcccctatgagtactacgagaaatataaaattcgccgctatgggtttcatggaacctcacatcgttatgtgagtaaacgtgctgcggaaattatgggcaaaccgtatgatcagctcaagatcattaccgttcacgtgggtaacggcgcatcagttgcggcggtgaagaatggcgtatctgttgacacttccatgggtttcacaccacttgaaggtcttgtcatgggcacgcgcagcggcgatattgatccggccatcgtggaatttcttgagaaagaagaaggattgtcggccaaagaagtcgtcaacattctctggaagaaatctggtgtgtatgggctcaccaaaggcccgagtagggacatgcgtgacattgtgctgaaggctattgaaggtgatcctgtatgccgccttgcattagatgtgtattattatcgtatcgcgaaatatattggcgcatacgctgcggccatgaacggtgttgacgcgatcgtctttaccgcaggagttggcgaaaatagcccgattatgcgcgaagaaattattgagaactacttgggctacttagggatcaagatcgataaagaagccaatgacttcaaaggtgaggagaagatcatttcaacgcccgattccaaagtgattgcgatggtagttccgaccaacgaggagctcatgatcgccaaagacacgaaagaaatcattgagaaagggttggacgagcttaagatc

SEQ ID NO: 1268 - protein, 417 aa, synthetic construct
  REGION 1..417: note = variant of acetate kinase from Marinitoga sp.38H-ov
MHHHHHHGGSGMKMLVINSGSSSIKYQLLDMRNEKVLAKGLVERIGIDGSRIVHKVNGEGHVLEHEIKNHEIGLKLVLDLLTDEKYGVLKDLKEIDAVGHRVVHGGERFASSVKITDEVLKTIETLSFLAPLHNPANIMGIKSSMKVLPGVPQVAVFDTAFHQKMPEKAYLYAIPYEYYEKYKIRRYGFHGTSHRYVSKRAAEIMGKPYDQLKIITVHVGNGASVAAVKNGVSVDTSMGFTPLEGLVMGTRSGDIDPAIVEFLEKEEGLSAKEVVNILWKKSGVYGLTKGPSRDMRDIVLKAIEGDPVCRLALDVYYYRIAKYIGAYAAAMNGVDAIVFTAGVGENSPIMREEIIENYLGYLGIKIDKEANDFKGEEKIISTPDSKVIAMVVPTNEELMIAKDTKEIIEKGLDELKI

SEQ ID NO: 1269 - DNA, 1251 bp, synthetic construct
  misc_feature 1..1251: note = variant of acetate kinase from Marinitoga sp.38H-ov
  source 1..1251: mol_type = other DNA
atgcaccatcatcatcatcatggcggtagcggcatgaaagttctggtgattaatttgggtagcagctccatcaaatatcagctcctcgatatgaccaacgaaaaggtattagcgaaaggcttggtcgaacgcattggcatcgacggttcgcgtatcgtgcataaagttaacggcgaagggcacgtgctggaacatgagattaaaaatcacgaaattggacttaaattggtcctggatcttcttacggacgaaaaatacggtgtgttgaaggatctcaaagaaatcgatgcagttgggcatcgcgtagtacatggcggcgagcgttttgccagtagcgtgaagattactgacgaagtcttaaagaccatcgagacgttgttgttcttagctccgttacacaatccagcgaacattatgggtatcaagagcagcatgaaagtgttaccgggtgtgcctcaagttgccgtctttgatacagcgttccaccagaagatgccggagaaagcctatttgtacgcaatcccctatgagtactacgagaaatataacattcgccgctatgggtttcatggaacctcacatcgttatgtgagtaaacgtgctgcggaaattatgggcaaaccgtacgatcagctcaagatcattaccgttcacgtgggtaacggcgcatcagttgcggcggtgaagaatggcgtatctgttgacacttccatgggtttcacaccacttgaaggtcttgtcatgggcacgcgcagcggcgatattgatccggccatcgtggaatttcttgagaaagaagaaggattgtcggccaaagaagtcgtcaacatcctctggaagaaatctggtgtgtatgggctcaccaaaggctttagtagggacatgcgtctgattgtgcggaaggctattgaaggtgatcctgtatgccgccttgcattagatgtgtattattatcgtatcgcgaaatatattggcgcatacgctgcggccatgaacggtgttgacgcgatcgtctttaccgcaggagttggcgaaaatagcccgattatgcgcgaagaaattattgagaactacttgggctacttagggatcaagatcgataaagaagccaatgacttcaaaggtgaggagaagatcatttcaacgcccgattccaaagtgattgcgatggtagttccgaccaacgaggagtatatgatcgccaaagacacgaaagaaatcattgagaaagggttggacgagcttaagatc

SEQ ID NO: 1270 - protein, 417 aa, synthetic construct
  REGION 1..417: note = variant of acetate kinase from Marinitoga sp.38H-ov
MHHHHHHGGSGMKVLVINLGSSSIKYQLLDMTNEKVLAKGLVERIGIDGSRIVHKVNGEGHVLEHEIKNHEIGLKLVLDLLTDEKYGVLKDLKEIDAVGHRVVHGGERFASSVKITDEVLKTIETLLFLAPLHNPANIMGIKSSMKVLPGVPQVAVFDTAFHQKMPEKAYLYAIPYEYYEKYNIRRYGFHGTSHRYVSKRAAEIMGKPYDQLKIITVHVGNGASVAAVKNGVSVDTSMGFTPLEGLVMGTRSGDIDPAIVEFLEKEEGLSAKEVVNILWKKSGVYGLTKGFSRDMRLIVRKAIEGDPVCRLALDVYYYRIAKYIGAYAAAMNGVDAIVFTAGVGENSPIMREEIIENYLGYLGIKIDKEANDFKGEEKIISTPDSKVIAMVVPTNEEYMIAKDTKEIIEKGLDELKI

SEQ ID NO: 1271 - DNA, 1251 bp, synthetic construct
  misc_feature 1..1251: note = variant of acetate kinase from Marinitoga sp.38H-ov
  source 1..1251: mol_type = other DNA
atgcaccatcatcatcatcatggcggtagcggcatgaaagtgctgagcattaattctggtagctcctccatcaaatatcagctcctcgatatgaccaacgaaaaggtattagcgaaaggcttggtcgaacgcattggcatcgacggttcgcgtatcgtgcataaagttaacggcgaagggcacgtgctggaacatgagattaaaaatcacgaaattggacttaaattggtcctggatcttcttacggacgaaaaatacggtccgttgaaggatctcaaagaaatcgatgcagttgggcatcgcgtagtacatggcggcgagcgttttgccagtagcgtgaagattactgacgaagtcttaaagaccatcgagacgttgtcgttcttagctccgttacacaatccagcgaacattatgggtatcaagagcagcatgaaagtgttaccgggtgtgcctcaagttgccgtctttgatacagcgttccaccagaagatgccggagaaagcctatttgtacgcaatcccctatgagtactacgagaaatataaaattcgccgctatgggtttcatggaacctcacatcgttatgtgagtaaacgtgctgcggaaattatgggcaaaccgtacgatcagctcaagatcattaccgttcacgtgggtaacggcgcatcagttgcggcggtgaagaatggcgtatctgttgacacttccatgggtttcacaccacttgaaggtcttgtcatgggcacgcgcagcggcgatattgatccggccatcgtggaatttcttgagaaagaagaaggattgtcggccaaagaagtcgtcaacatcctctggaagaaatctggtgtgtatgggctcaccaaaggctttagtagggacatgcgtgacattgtgctgaaggctattgaaggtgatcctgtatgccgccttgcattagatgtgtattattatcgtatcgcgaaatatattggcgcatacgctgcggccatgaacggtgttgacgcgatcgtctttaccgcaggagttggcgaaaatagcccgattatgcgcgaagaaattattgagaactacttgggctacttagggatcaagatcgataaagaagccaatgacttcaaaggtgaggagaagatcatttcaacgcccgattccaaagtgattgcgatggtagttccgaccaacgaggagctcatgatcgccaaagacacgaaagaaatcattgagaaagggttggacgagcttaagatc

SEQ ID NO: 1272 - protein, 417 aa, synthetic construct
  REGION 1..417: note = variant of acetate kinase from Marinitoga sp.38H-ov
MHHHHHHGGSGMKVLSINSGSSSIKYQLLDMTNEKVLAKGLVERIGIDGSRIVHKVNGEGHVLEHEIKNHEIGLKLVLDLLTDEKYGPLKDLKEIDAVGHRVVHGGERFASSVKITDEVLKTIETLSFLAPLHNPANIMGIKSSMKVLPGVPQVAVFDTAFHQKMPEKAYLYAIPYEYYEKYKIRRYGFHGTSHRYVSKRAAEIMGKPYDQLKIITVHVGNGASVAAVKNGVSVDTSMGFTPLEGLVMGTRSGDIDPAIVEFLEKEEGLSAKEVVNILWKKSGVYGLTKGFSRDMRDIVLKAIEGDPVCRLALDVYYYRIAKYIGAYAAAMNGVDAIVFTAGVGENSPIMREEIIENYLGYLGIKIDKEANDFKGEEKIISTPDSKVIAMVVPTNEELMIAKDTKEIIEKGLDELKI

SEQ ID NO: 1273 - DNA, 1251 bp, synthetic construct
  misc_feature 1..1251: note = variant of acetate kinase from Marinitoga sp.38H-ov
  source 1..1251: mol_type = other DNA
atgcaccatcatcatcatcatggcggtagcggcatgaaagtgctggtgattaattctggtagctcctccatcaaatatcagctcctcgatatgaccaacgaaaaggtattagcgaaaggcttggtcgaacgcattggcatcgacggttcgcgtatcgtgcttaaagttaacggcgaagggcacgtgctggaacatgagattaaaaatcacgaaattggacttaaattggtcctggatcttcttacggacgaaaaatacggtgtgttgaaggatctcaaagaaatcgatgcagttgggcatcgcgtagtacatggcggcgagcgttttgccagtagcgtgaagattactgacgaagtcttaaagaccatcgagacgttgtcgttcttagctccgttacacaatccagcgaacattatgggtatcaagagcagcatgaaagtgttaccgggtgtgcctcaagttgccgtctttgatacagcgttccaccagaagatgccggagaaagcctatttgtacgcaatcccctatgagtactacgagaaatataaaattcgccgctatgggtttcatggaacctcacatcgttatgtgagtaaacgtgctgcggaaattatgggcaaaccgtatgatcagctcaagatcattaccgttcacgtgggtaacggcgcatcagttgcggcggtgaagaatggcgtatctgttgacacttccatgggtttcacaccacttgaaggtcttgtcatgggcacgcgcagcggcgatattgatccggccatcgtggaatttcttgagaaagaagaaggattgtcggccaaagaagtcgtcaacgcgctctggaagaaatctggtgtgtatgggctcaccaaaggctttagtagggacatgcgtgacattgtgctgaaggctattgaaggtgatcctgtatgccgccttgcattagatgtgtattattatcgtatcgcgaaatatattggcgcatacgctgcggccatgaacggtgttgacgcgatcgtctttaccgcaggagttggcgaaaatagcccgattatgcgcgaagaaattattgagaactacttgggctacttagggatcaagatcgataaagaagccaatgacttcaaaggtgaggagaagatcatttcaacgcccgattccaaagtgattgcgatggtagttccgaccaacgaggagctcatgatcgccaaagacacgaaagaaatcattgagaaagggttggacgagcttaagatc

SEQ ID NO: 1274 - protein, 417 aa, synthetic construct
  REGION 1..417: note = variant of acetate kinase from Marinitoga sp.38H-ov
MHHHHHHGGSGMKVLVINSGSSSIKYQLLDMTNEKVLAKGLVERIGIDGSRIVLKVNGEGHVLEHEIKNHEIGLKLVLDLLTDEKYGVLKDLKEIDAVGHRVVHGGERFASSVKITDEVLKTIETLSFLAPLHNPANIMGIKSSMKVLPGVPQVAVFDTAFHQKMPEKAYLYAIPYEYYEKYKIRRYGFHGTSHRYVSKRAAEIMGKPYDQLKIITVHVGNGASVAAVKNGVSVDTSMGFTPLEGLVMGTRSGDIDPAIVEFLEKEEGLSAKEVVNALWKKSGVYGLTKGFSRDMRDIVLKAIEGDPVCRLALDVYYYRIAKYIGAYAAAMNGVDAIVFTAGVGENSPIMREEIIENYLGYLGIKIDKEANDFKGEEKIISTPDSKVIAMVVPTNEELMIAKDTKEIIEKGLDELKI

SEQ ID NO: 1275 - DNA, 1251 bp, synthetic construct
  misc_feature 1..1251: note = variant of acetate kinase from Marinitoga sp.38H-ov
  source 1..1251: mol_type = other DNA
atgcaccatcatcatcatcatggcggtagcggcatgaaagtgctggtgattaattctggtagctcctccatcaaatatcagctcctcgatatgcgcaacgaaaaggtattagcgaaaggcttggtcgaacgcattggcatcgacggttcgcgtatcgtgcataaagttaacggcgaagggcacgtgctggaacatgagattaaaaatcacgaaattggacttaaattggtcctggatcttcttacggacgaaaaatacggtgtgttgaaggatctcaaagaaatcgatgcagttgggcatcgcgtagtacatggcggcgagcgttttgccagtagcgtgaagattactgacgaagtcttaaagaccatcgagacgttgtcgttcttagctccgttacacaatccagcgaacattatgggtatcaagagcagcatgaaagtgttaccgggtgtgcctcaagttgccgtctttgatacagcgttccaccagaagatgccggagaaagcctatttgtacgcaatcccctatgagtactacgagaaatataaaattcgccgctatgggtttcatggaacctcacatcgttatgtgagtaaacgtgctgcggaaattatgggcaaaccgtacgatcagctcaagatcattaccgttcacgtgggtaacggcgcatcagttgcggcggtgaagaatggcgtatctgttgacacttccatgggtttcacaccacttgaaggtcttgtcatgggcacgcgcagcggcgatattgatccggccatcgtggaatttcttgagaaagaagaaggattgtcggccaaagaagtcgtcaacattctctggaagaaatctggtgtgtatgggctcaccaaaggctttagtagggacatgcgtgacattgtgctgaaggctattgaaggtgatcctgtatgccgccttgcattagatgtgtattattatcgtatcgcgaaatatattggcgcatacgctgcggccatgaacggtgttgacgcgatcgtctttaccgcaggagttggcgaaaatagcccgattatgcgcgaagaaattattgagaactacttgggctacttagggatcaagatcgataaagaagccaatgacttcaaaggtgaggagaagatcatttcaacgcccgattccaaagtgattgcgatggtagttccgaccaacgaggagctcatgatcgccaaagacacgaaagaaatcattgagaaagggttggacgagcttaagatc

SEQ ID NO: 1276 - protein, 417 aa, synthetic construct
  REGION 1..417: note = variant of acetate kinase from Marinitoga sp.38H-ov
MHHHHHHGGSGMKVLVINSGSSSIKYQLLDMRNEKVLAKGLVERIGIDGSRIVHKVNGEGHVLEHEIKNHEIGLKLVLDLLTDEKYGVLKDLKEIDAVGHRVVHGGERFASSVKITDEVLKTIETLSFLAPLHNPANIMGIKSSMKVLPGVPQVAVFDTAFHQKMPEKAYLYAIPYEYYEKYKIRRYGFHGTSHRYVSKRAAEIMGKPYDQLKIITVHVGNGASVAAVKNGVSVDTSMGFTPLEGLVMGTRSGDIDPAIVEFLEKEEGLSAKEVVNILWKKSGVYGLTKGFSRDMRDIVLKAIEGDPVCRLALDVYYYRIAKYIGAYAAAMNGVDAIVFTAGVGENSPIMREEIIENYLGYLGIKIDKEANDFKGEEKIISTPDSKVIAMVVPTNEELMIAKDTKEIIEKGLDELKI

SEQ ID NO: 1277 - DNA, 1251 bp, synthetic construct
  misc_feature 1..1251: note = variant of acetate kinase from Marinitoga sp.38H-ov
  source 1..1251: mol_type = other DNA
atgcaccatcatcatcatcatggcggtagcggcatgaaagtgctgagcattaattctggtagctcctccatcaaatatcagctcctcgatatgaccaacgaaaaggtattagcgaaaggcttggtcgaacgcattggcatcgacggttcgcgtatcgtgcataaagttaacggcgaagggcacgtgctggaacatgagattaaaaatcacgaaattggacttaaattggtcctggatcttcttacggacgaaaaatacggtgtgttgaaggatctcaaagaaatcgatgcagttgggcatcgcgtagtacatggcggcgagcgttttgccagtagcgtgaagattactgacgaagtcttaaagaccatcgagacgttgtcgttcttagctccgttacacaatccagcgaacattatgggtatcaagagcagcatgaaagtgttaccgggtgtgcctcaagttgccgtctttgatacagcgttccaccagaagatgccggagaaagcctatttgtacgcaatcccctatgagtactacgagaaatataaaattcgccgctatgggtttcatggaacctcacatcgttatgtgagtaaacgtgctgcggaaattatgggcaaaccgtacgatcagctcaagatcattaccgttcacgtgggtaacggcgcatcagttgcggcggtgaagaatggcgtatctgttgacacttccatgggtttcacaccacttgaaggtcttgtcatgggcacgcgcagcggcgatattgatccggccatcgtggaatttcttgagaaagaagaaggattgtcggccaaagaagtcgtcaacattctctggaagaaatctggtgtgtatgggctcaccaaaggctttagtagggacatgcgtgacattgtgctgaaggctattgaaggtgatcctgtatgccgccttgcattagatgtgtattattatcgtatcgcgaaatatattggcgcatacgctgcggccatgaacggtgttgacgcgatcgtctttaccgcaggagttggcgaaaatagcccgattatgcgcgaagaaattattgagaactacttgggctacttagggatcaagatcgataaagaagccaatgacttcaaaggtgaggagaagatcatttcaacgcccgattccaaagtgattgcgatggtagttccgaccaacgaggagctcatgatcgccaaagacacgaaagaaatcattgagaaagggttggacgagcttaagatc

SEQ ID NO: 1278 - protein, 417 aa, synthetic construct
  REGION 1..417: note = variant of acetate kinase from Marinitoga sp.38H-ov
MHHHHHHGGSGMKVLSINSGSSSIKYQLLDMTNEKVLAKGLVERIGIDGSRIVHKVNGEGHVLEHEIKNHEIGLKLVLDLLTDEKYGVLKDLKEIDAVGHRVVHGGERFASSVKITDEVLKTIETLSFLAPLHNPANIMGIKSSMKVLPGVPQVAVFDTAFHQKMPEKAYLYAIPYEYYEKYKIRRYGFHGTSHRYVSKRAAEIMGKPYDQLKIITVHVGNGASVAAVKNGVSVDTSMGFTPLEGLVMGTRSGDIDPAIVEFLEKEEGLSAKEVVNILWKKSGVYGLTKGFSRDMRDIVLKAIEGDPVCRLALDVYYYRIAKYIGAYAAAMNGVDAIVFTAGVGENSPIMREEIIENYLGYLGIKIDKEANDFKGEEKIISTPDSKVIAMVVPTNEELMIAKDTKEIIEKGLDELKI

SEQ ID NO: 1279 - DNA, 1251 bp, synthetic construct
  misc_feature 1..1251: note = variant of acetate kinase from Marinitoga sp.38H-ov
  source 1..1251: mol_type = other DNA
atgcaccatcatcatcatcatggcggtagcggcatgaaagttctggtgattaattctggtagctcctccatcaaatatcagctcctcgatatgcgcaacgaaaaggtattagcgaaaggcttggtcgaacgcattggcatcgacggttcgcgtatcgtgcttaaagttaacggcgaagggcacgtgctggaacatgagattaaaaatcacgaaattggacttaaattggtcctggatcttcttacggacgaaaaatacggtgtgttgaaggatctcaaagaaatcgatgcagttgggcatcgcgtagtacatggcggcgagcgttttgccagtagcgtgaagattactgacgaagtcttaaagaccatcgagacgttgtcgttcttagctccgttacacaatccagcgaacattatgggtatcaagagcagcatgaaagtgttaccgggtgtgcctcaagttgccgtctttgatacagcgttccaccagaagatgccggagaaagcctatttgtacgcaatcccctatgagtactacgagaaatataaaattcgccgctatgggtttcatggaacctcacatcgttatgtgagtaaacgtgctgcggaaattatgggcaaaccgctggatcagctcaagatcattaccgttcacgtgggtaacggcgcatcagttgcggcggtgaagaatggcgtatctgttgacacttccatgggtttcacaccacttgaaggtcttgtcatgggcacgcgcagcggcgatattgatccggccatcgtggaatttcttgagaaagaagaaggattgtcggccaaagaagtcgtcaacattctctggaagaaatctggtgtgtatgggctcaccaaaggctttagtagggacatgcgtgacattgtgctgaaggctattgaaggtgatcctgtatgccgccttgcattagatgtgtattattatcgtatcgcgaaatatattggcgcatacgctgcggccatgaacggtgttgacgcgatcgtctttaccgcaggagttggcgaaaatagcccgattatgcgcgaagaaattattgagaactacttgggctacttagggatcaagatcgataaagaagccaatgacttcaaaggtgaggagaagatcatttcaacgcccgattccaaagtgattgcgatggtagttccgaccaacgaggagctcatgatcgccaaagacacgaaagaaatcattgagaaagggttggacgagcttaagatc

SEQ ID NO: 1280 - protein, 417 aa, synthetic construct
  REGION 1..417: note = variant of acetate kinase from Marinitoga sp.38H-ov
MHHHHHHGGSGMKVLVINSGSSSIKYQLLDMRNEKVLAKGLVERIGIDGSRIVLKVNGEGHVLEHEIKNHEIGLKLVLDLLTDEKYGVLKDLKEIDAVGHRVVHGGERFASSVKITDEVLKTIETLSFLAPLHNPANIMGIKSSMKVLPGVPQVAVFDTAFHQKMPEKAYLYAIPYEYYEKYKIRRYGFHGTSHRYVSKRAAEIMGKPLDQLKIITVHVGNGASVAAVKNGVSVDTSMGFTPLEGLVMGTRSGDIDPAIVEFLEKEEGLSAKEVVNILWKKSGVYGLTKGFSRDMRDIVLKAIEGDPVCRLALDVYYYRIAKYIGAYAAAMNGVDAIVFTAGVGENSPIMREEIIENYLGYLGIKIDKEANDFKGEEKIISTPDSKVIAMVVPTNEELMIAKDTKEIIEKGLDELKI

SEQ ID NO: 1281 - DNA, 1251 bp, synthetic construct
  misc_feature 1..1251: note = variant of acetate kinase from Marinitoga sp.38H-ov
  source 1..1251: mol_type = other DNA
atgcaccatcatcatcatcatggcggtagcggcatgaaagttctggtgattaattcgggtagccgctccatcaaatatcagctcctcgatatgaccaacgaaaaggtattagcgaaaggcttggtcgaacgcattggcatcgacggttcgcgtatcgtgcataaagttaacggcgaagggcacgtgctggaacatgagattaaaaatcacgaaattggacttaaattggtcctggatcttcttacggacgaaaaatacggtgtgttgaaggatctcaaagaaatcgatgcagttgggcatcgcgtagtacatggcggcgagcgttttgccagtagcgtgaagattactgacgaagtcttaaagaccatcgagacgttgtcgttcttagctccgttacacaatccagcgaacattatgggtatcaagagcagcatgaaagtgttaccgggtgtgcctcaagttgccgtctttgatacagcgttccaccagaagatgccggagaaagcctatttgtacgcaatcccctatgagtactacgagaaatataacattcgccgctatgggtttcatggaacctcacatcgttatgtgagtaaacgtgctgcggaaattatgggcaaaccgtacgatcagctcaagatcattaccgttcacgtgggtaacggcgcatcagttgcggcggtgaagaatggcgtatctgttgacacttccatgggtttcacaccacttgaaggtcttgtcatgggcacgcgcagcggcgatattgatccggccatcgtggaatttcttgagaaagaagaaggattgtcggccaaagaagtcgtcaacatcctctggaagaaatctggtgtgtatgggctcaccaaaggctttagtagggacatgcgtctgattgtgctgaaggctattgaaggtgatcctgtatgccgccttgcattagatgtgtattattatcgtatcgcgaaatatattggcgcatacgctgcggccatgaacggtgttgacgcgatcgtctttaccgcaggagttggcgaaaatagcccgattatgcgcgaagaaattattgagaactacttgggctacttagggatcaagatcgataaagaagccaatgacttcaaaggtgaggagaagatcatttcaacgcccgattccaaagtgattgcgatggtagttccgaccaacgaggagtatatgatcgccaaagacacgaaagaaatcattgagaaagggttggacgagcttaagatc

SEQ ID NO: 1282 - protein, 417 aa, synthetic construct
  REGION 1..417: note = variant of acetate kinase from Marinitoga sp.38H-ov
MHHHHHHGGSGMKVLVINSGSRSIKYQLLDMTNEKVLAKGLVERIGIDGSRIVHKVNGEGHVLEHEIKNHEIGLKLVLDLLTDEKYGVLKDLKEIDAVGHRVVHGGERFASSVKITDEVLKTIETLSFLAPLHNPANIMGIKSSMKVLPGVPQVAVFDTAFHQKMPEKAYLYAIPYEYYEKYNIRRYGFHGTSHRYVSKRAAEIMGKPYDQLKIITVHVGNGASVAAVKNGVSVDTSMGFTPLEGLVMGTRSGDIDPAIVEFLEKEEGLSAKEVVNILWKKSGVYGLTKGFSRDMRLIVLKAIEGDPVCRLALDVYYYRIAKYIGAYAAAMNGVDAIVFTAGVGENSPIMREEIIENYLGYLGIKIDKEANDFKGEEKIISTPDSKVIAMVVPTNEEYMIAKDTKEIIEKGLDELKI

SEQ ID NO: 1283 - DNA, 1251 bp, synthetic construct
  misc_feature 1..1251: note = variant of acetate kinase from Marinitoga sp.38H-ov
  source 1..1251: mol_type = other DNA
atgcaccatcatcatcatcatggcggtagcggcatgaaagtgctggtgattaattctggtagctcctccatcaaatatcagctcctcgatatgaccaacgaaaaggtattagcgaaaggcttggtcgaacgcattggcatcgacggttcgcgtatcgtgcataaagttaacggcgaagggcacgtgctggaacatgagattaaaaatcacgaaattggacttaaattggtcctggatcttcttacggacgaaaaatacggtaacttgaaggatctcaaagaaatcgatgcagttgggcatcgcgtagtacatggcggcgagcgttttgccagtagcgtgaagattactgacgaagtcttaaagaccatcgagacgttgtcgttcttagctccgttacacaatccagcgaacattatgggtatcaagagcagcatgaaagtgttaccgggtgtgcctcaagttgccgtctttgatacagcgttccaccagaagatgccggagaaagcctatttgtacgcaatcccctatgagtactacgagaaatataaaattcgccgctatgggtttcatggaacctcacatcgttatgtgagtaaacgtgctgcggaaattatgggcaaaccgtacgatcagctcaagatcattaccgttcacgtgggtaacggcgcatcagttgcggcggtgaagaatggcgtatctgttgacacttccatgggtttcacaccacttgaaggtcttgtcatgggcacgcgcagcggcgatattgatccggccatcgtggaatttcttgagaaagaagaaggattgtcggccaaagaagtcgtcaacattctctggaagaaatctggtgtgtatgggctcaccaaaggctttagtagggacatgcgtgacattgtgctgaaggctattgaaggtgatcctgtatgccgccttgcattagatgtgtattattatcgtatcgcgaaatatattggcgcatacgctgcggccatgaacggtgttgacgcgatcgtctttaccgcaggagttggcgaaaatagcccgattatgcgcgaagaaattattgagaactacttgggctacttagggatcaagatcgataaagaagccaatgacttcaaaggtgaggagaagatcatttcaacgcccgattccaaagtgattgcgatggtagttccgaccaacgaggagctcatgatcgccaaagacacgaaagaaatcattgagaaagggttggacgagcttaagatc

SEQ ID NO: 1284 - protein, 417 aa, synthetic construct
  REGION 1..417: note = variant of acetate kinase from Marinitoga sp.38H-ov
MHHHHHHGGSGMKVLVINSGSSSIKYQLLDMTNEKVLAKGLVERIGIDGSRIVHKVNGEGHVLEHEIKNHEIGLKLVLDLLTDEKYGNLKDLKEIDAVGHRVVHGGERFASSVKITDEVLKTIETLSFLAPLHNPANIMGIKSSMKVLPGVPQVAVFDTAFHQKMPEKAYLYAIPYEYYEKYKIRRYGFHGTSHRYVSKRAAEIMGKPYDQLKIITVHVGNGASVAAVKNGVSVDTSMGFTPLEGLVMGTRSGDIDPAIVEFLEKEEGLSAKEVVNILWKKSGVYGLTKGFSRDMRDIVLKAIEGDPVCRLALDVYYYRIAKYIGAYAAAMNGVDAIVFTAGVGENSPIMREEIIENYLGYLGIKIDKEANDFKGEEKIISTPDSKVIAMVVPTNEELMIAKDTKEIIEKGLDELKI

SEQ ID NO: 1285 - DNA, 1251 bp, synthetic construct
  misc_feature 1..1251: note = variant of acetate kinase from Marinitoga sp.38H-ov
  source 1..1251: mol_type = other DNA
atgcaccatcatcatcatcatggcggtagcggcatgaaaatgctggtgattaattctggtagctcctccatcaaatatcagctcctcgatatgaccaacgaaaaggtattagcgaaaggcttggtcgaacgcattggcatcgacggttcgcgtatcgtgcataaagttaacggcgaagggcacgtgctggaacatgagattaaaaatcacgaaattggacttaaattggtcctggatcttcttacggacgaaaaatacggtgtgttgaaggatctcaaagaaatcgatgcagttgggcatcgcgtagtacatggcggcgagcgttttgccagtagcgtgaagattactgacgaagtcttaaagaccatcgagacgttgtcgttcttagctccgttacacaatccagcgaacattatgggtatcaagagcagcatgaaagtgttaccgggtgtgcctcaagttgccgtctttgatacagcgttccaccagaagatgccggagaaagcctatttgtacgcaatcccctatgagtactacgagaaatataaaattcgccgctatgggtttcatggaacctcacatcgttatgtgagtaaacgtgctgcggaaattatgggcaaaccgcgggatcagctcaagatcattaccgttcacgtgggtaacggcgcatcagttgcggcggtgaagaatggcgtatctgttgacacttccatgggtttcacaccacttgaaggtcttgtcatgggcacgcgcagcggcgatattgatccggccatcgtggaatttcttgagaaagaagaaggattgtcggccaaagaagtcgtcaacatcctctggaagaaatctggtgtgtatgggctcaccaaaggctttagtagggacatgcgtgacattgtgctgaaggctattgaaggtgatcctgtatgccgccttgcattagatgtgtattattatcgtatcgcgaaatatattggcgcatacgctgcggccatgaacggtgttgacgcgatcgtctttaccgcaggagttggcgaaaatagcccgattatgcgcgaagaaattattgagaactacttgggctacttagggatcaagatcgataaagaagccaatgacttcaaaggtgaggagaagatcatttcaacgcccgattccaaagtgattgcgatggtagttccgaccaacgaggagctcatgatcgccaaagacacgaaagaaatcattgagaaagggttggacgagcttaagatc

SEQ ID NO: 1286 - protein, 417 aa, synthetic construct
  REGION 1..417: note = variant of acetate kinase from Marinitoga sp.38H-ov
MHHHHHHGGSGMKMLVINSGSSSIKYQLLDMTNEKVLAKGLVERIGIDGSRIVHKVNGEGHVLEHEIKNHEIGLKLVLDLLTDEKYGVLKDLKEIDAVGHRVVHGGERFASSVKITDEVLKTIETLSFLAPLHNPANIMGIKSSMKVLPGVPQVAVFDTAFHQKMPEKAYLYAIPYEYYEKYKIRRYGFHGTSHRYVSKRAAEIMGKPRDQLKIITVHVGNGASVAAVKNGVSVDTSMGFTPLEGLVMGTRSGDIDPAIVEFLEKEEGLSAKEVVNILWKKSGVYGLTKGFSRDMRDIVLKAIEGDPVCRLALDVYYYRIAKYIGAYAAAMNGVDAIVFTAGVGENSPIMREEIIENYLGYLGIKIDKEANDFKGEEKIISTPDSKVIAMVVPTNEELMIAKDTKEIIEKGLDELKI

SEQ ID NO: 1287 - DNA, 1251 bp, synthetic construct
  misc_feature 1..1251: note = variant of acetate kinase from Marinitoga sp.38H-ov
  source 1..1251: mol_type = other DNA
atgcaccatcatcatcatcatggcggtagcggcatgaaagtgctgagcattaattctggtagctcctccatcaaatatcagctcctcgatatgcgcaacgaaaaggtattagcgaaaggcttggtcgaacgcattggcatcgacggttcgcgtatcgtgcttaaagttaacggcgaagggcacgtgctggaacatgagattaaaaatcacgaaattggacttaaattggtcctggatcttcttacggacgaaaaatacggtgtgttgaaggatctcaaagaaatcgatgcagttgggcatcgcgtagtacatggcggcgagcgttttgccagtagcgtgaagattactgacgaagtcttaaagaccatcgagacgttgtcgttcttagctccgttacacaatccagcgaacattatgggtatcaagagcagcatgaaagtgttaccgggtgtgcctcaagttgccgtctttgatacagcgttccaccagaagatgccggagaaagcctatttgtacgcaatcccctatgagtactacgagaaatataaaattcgccgctatgggtttcatggaacctcacatcgttatgtgagtaaacgtgctgcggaaattatgggcaaaccgcgggatcagctcaagatcattaccgttcacgtgggtaacggcgcatcagttgcggcggtgaagaatggcgtatctgttgacacttccatgggtttcacaccacttgaaggtcttgtcatgggcacgcgcagcggcgatattgatccggccatcgtggaatttcttgagaaagaagaaggattgtcggccaaagaagtcgtcaacgcgctctggaagaaatctggtgtgtatgggctcaccaaaggctttagtagggacatgcgtgacattgtgctgaaggctattgaaggtgatcctgtatgccgccttgcattagatgtgtattattatcgtatcgcgaaatatattggcgcatacgctgcggccatgaacggtgttgacgcgatcgtctttaccgcaggagttggcgaaaatagcccgattatgcgcgaagaaattattgagaactacttgggctacttagggatcaagatcgataaagaagccaatgacttcaaaggtgaggagaagatcatttcaacgcccgattccaaagtgattgcgatggtagttccgaccaacgaggagctcatgatcgccaaagacacgaaagaaatcattgagaaagggttggacgagcttaagatc

SEQ ID NO: 1288 - protein, 417 aa, synthetic construct
  REGION 1..417: note = variant of acetate kinase from Marinitoga sp.38H-ov
MHHHHHHGGSGMKVLSINSGSSSIKYQLLDMRNEKVLAKGLVERIGIDGSRIVLKVNGEGHVLEHEIKNHEIGLKLVLDLLTDEKYGVLKDLKEIDAVGHRVVHGGERFASSVKITDEVLKTIETLSFLAPLHNPANIMGIKSSMKVLPGVPQVAVFDTAFHQKMPEKAYLYAIPYEYYEKYKIRRYGFHGTSHRYVSKRAAEIMGKPRDQLKIITVHVGNGASVAAVKNGVSVDTSMGFTPLEGLVMGTRSGDIDPAIVEFLEKEEGLSAKEVVNALWKKSGVYGLTKGFSRDMRDIVLKAIEGDPVCRLALDVYYYRIAKYIGAYAAAMNGVDAIVFTAGVGENSPIMREEIIENYLGYLGIKIDKEANDFKGEEKIISTPDSKVIAMVVPTNEELMIAKDTKEIIEKGLDELKI

SEQ ID NO: 1289 - DNA, 1251 bp, synthetic construct
  misc_feature 1..1251: note = variant of acetate kinase from Marinitoga sp.38H-ov
  source 1..1251: mol_type = other DNA
atgcaccatcatcatcatcatggcggtagcggcatgaaagttctggtgattaatcagggtagcagctccatcaaatatcagctcctcgatatgaccaacgaaaaggtattagcgaaaggcttggtcgaacgcattggcatcgacggttcgcgtatcgtgcataaagttaacggcgaagggcacgtgctggaacatgagattaaaaatcacgaaattggacttaaattggtcctggatcttcttacggacgaaaaatacggtgtgttgaaggatctcaaagaaatcgatgcagttgggcatcgcgtagtacatggcggcgagcgttttgccagtagcgtgaagattactgacgaagtcttaaagaccatcgagacgttgttgttcttagctccgttacacaatccagcgaacattatgggtatcaagagcagcatgaaagtgttaccgggtgtgcctcaagttgccgtctttgatacagcgttccaccagaagatgccggagaaagcctatttgtacgcaatcccctatgagtactacgagaaatataaaattcgccgctatgggtttcatggaacctcacatcgttatgtgagtaaacgtgctgcggaaattatgggcaaaccgtacgatcagctcaagatcattaccgttcacgtgggtaacggcgcatcagttgcggcggtgaagaatggcgtatctgttgacacttccatgggtttcacaccacttgaaggtcttgtcatgggcacgcgcagcggcgatattgatccggccatcgtggaatttcttgagaaagaagaaggattgtcggccaaagaagtcgtcaacatcctctggaagaaatctggtgtgtatgggctcaccaaaggctttggtagggacatgcgtgatattgtgcggaaggctattgaaggtgatcctgtatgccgccttgcattagatgtgtattattatcgtatcgcgaaatatattggcgcatacgctgcggccatgaacggtgttgacgcgatcgtctttaccgcaggagttggcgaaaatagcccgattatgcgcgaagaaattattgagaactacttgggctacttagggatcaagatcgataaagaagccaatgacttcaaaggtgaggagaagatcatttcaacgcccgattccaaagtgattgcgatggtagttccgaccaacgaggagtatatgatcgccaaagacacgaaagaaatcattgagaaagggttggacgagcttaagatc

SEQ ID NO: 1290 - protein, 417 aa, synthetic construct
  REGION 1..417: note = variant of acetate kinase from Marinitoga sp.38H-ov
MHHHHHHGGSGMKVLVINQGSSSIKYQLLDMTNEKVLAKGLVERIGIDGSRIVHKVNGEGHVLEHEIKNHEIGLKLVLDLLTDEKYGVLKDLKEIDAVGHRVVHGGERFASSVKITDEVLKTIETLLFLAPLHNPANIMGIKSSMKVLPGVPQVAVFDTAFHQKMPEKAYLYAIPYEYYEKYKIRRYGFHGTSHRYVSKRAAEIMGKPYDQLKIITVHVGNGASVAAVKNGVSVDTSMGFTPLEGLVMGTRSGDIDPAIVEFLEKEEGLSAKEVVNILWKKSGVYGLTKGFGRDMRDIVRKAIEGDPVCRLALDVYYYRIAKYIGAYAAAMNGVDAIVFTAGVGENSPIMREEIIENYLGYLGIKIDKEANDFKGEEKIISTPDSKVIAMVVPTNEEYMIAKDTKEIIEKGLDELKI

SEQ ID NO: 1291 - DNA, 1251 bp, synthetic construct
  misc_feature 1..1251: note = variant of acetate kinase from Marinitoga sp.38H-ov
  source 1..1251: mol_type = other DNA
atgcaccatcatcatcatcatggcggtagcggcatgaaagttctggtgattaattctggtagctcctccatcaaatatcagctcctcgatatgaccaacgaaaaggtattagcgaaaggcttggtcgaacgcattggcatcgacggttcgcgtatcgtgcttaaagttaacggcgaagggcacgtgctggaacatgagattaaaaatcacgaaattggacttaaattggtcctggatcttcttacggacgaaaaatacggtgtgttgaaggatctcaaagaaatcgatgcagttgggcatcgcgtagtacatggcggcgagcgttttgccagtagcgtgaagattactgacgaagtcttaaagaccatcgagacgttgtcgttcttagctccgttacacaatccagcgaacattatgggtatcaagagcagcatgaaagtgttaccgggtgtgcctcaagttgccgtctttgatacagcgttccaccagaagatgccggagaaagcctatttgtacgcaatcccctatgagtactacgagaaatataaaattcgccgctatgggtttcatggaacctcacatcgttatgtgagtaaacgtgctgcggaaattatgggcaaaccgtatgatcagctcaagatcattaccgttcacgtgggtaacggcgcatcagttgcggcggtgaagaatggcgtatctgttgacacttccatgggtttcacaccacttgaaggtcttgtcatgggcacgcgcagcggcgatattgatccggccatcgtggaatttcttgagaaagaagaaggattgtcggccaaagaagtcgtcaacattctctggaagaaatctggtgtgtatgggctcaccaaaggcccgagtagggacatgcgtgacattgtgctgaaggctattgaaggtgatcctgtatgccgccttgcattagatgtgtattattatcgtatcgcgaaatatattggcgcatacgctgcggccatgaacggtgttgacgcgatcgtctttaccgcaggagttggcgaaaatagcccgattatgcgcgaagaaattattgagaactacttgggctacttagggatcaagatcgataaagaagccaatgacttcaaaggtgaggagaagatcatttcaacgcccgattccaaagtgattgcgatggtagttccgaccaacgaggagctcatgatcgccaaagacacgaaagaaatcattgagaaagggttggacgagcttaagatc

SEQ ID NO: 1292 - protein, 417 aa, synthetic construct
  REGION 1..417: note = variant of acetate kinase from Marinitoga sp.38H-ov
MHHHHHHGGSGMKVLVINSGSSSIKYQLLDMTNEKVLAKGLVERIGIDGSRIVLKVNGEGHVLEHEIKNHEIGLKLVLDLLTDEKYGVLKDLKEIDAVGHRVVHGGERFASSVKITDEVLKTIETLSFLAPLHNPANIMGIKSSMKVLPGVPQVAVFDTAFHQKMPEKAYLYAIPYEYYEKYKIRRYGFHGTSHRYVSKRAAEIMGKPYDQLKIITVHVGNGASVAAVKNGVSVDTSMGFTPLEGLVMGTRSGDIDPAIVEFLEKEEGLSAKEVVNILWKKSGVYGLTKGPSRDMRDIVLKAIEGDPVCRLALDVYYYRIAKYIGAYAAAMNGVDAIVFTAGVGENSPIMREEIIENYLGYLGIKIDKEANDFKGEEKIISTPDSKVIAMVVPTNEELMIAKDTKEIIEKGLDELKI

SEQ ID NO: 1293 - DNA, 1251 bp, synthetic construct
  misc_feature 1..1251: note = variant of acetate kinase from Marinitoga sp.38H-ov
  source 1..1251: mol_type = other DNA
atgcaccatcatcatcatcatggcggtagcggcatgaaagttctggtgattaattctggtagctcctccatcaaatatcagctcctcgatatgaccaacgaaaaggtattagcgaaaggcttggtcgaacgcattggcatcgacggttcgcgtatcgtgcttaaagttaacggcgaagggcacgtgctggaacatgagattaaaaatcacgaaattggacttaaattggtcctggatcttcttacggacgaaaaatacggtaacttgaaggatctcaaagaaatcgatgcagttgggcatcgcgtagtacatggcggcgagcgttttgccagtagcgtgaagattactgacgaagtcttaaagaccatcgagacgttgtcgttcttagctccgttacacaatccagcgaacattatgggtatcaagagcagcatgaaagtgttaccgggtgtgcctcaagttgccgtctttgatacagcgttccaccagaagatgccggagaaagcctatttgtacgcaatcccctatgagtactacgagaaatataaaattcgccgctatgggtttcatggaacctcacatcgttatgtgagtaaacgtgctgcggaaattatgggcaaaccgtatgatcagctcaagatcattaccgttcacgtgggtaacggcgcatcagttgcggcggtgaagaatggcgtatctgttgacacttccatgggtttcacaccacttgaaggtcttgtcatgggcacgcgcagcggcgatattgatccggccatcgtggaatttcttgagaaagaagaaggattgtcggccaaagaagtcgtcaacgcgctctggaagaaatctggtgtgtatgggctcaccaaaggctttagtagggacatgcgtgacattgtgctgaaggctattgaaggtgatcctgtatgccgccttgcattagatgtgtattattatcgtatcgcgaaatatattggcgcatacgctgcggccatgaacggtgttgacgcgatcgtctttaccgcaggagttggcgaaaatagcccgattatgcgcgaagaaattattgagaactacttgggctacttagggatcaagatcgataaagaagccaatgacttcaaaggtgaggagaagatcatttcaacgcccgattccaaagtgattgcgatggtagttccgaccaacgaggagctcatgatcgccaaagacacgaaagaaatcattgagaaagggttggacgagcttaagatc

SEQ ID NO: 1294 - protein, 417 aa, synthetic construct
  REGION 1..417: note = variant of acetate kinase from Marinitoga sp.38H-ov
MHHHHHHGGSGMKVLVINSGSSSIKYQLLDMTNEKVLAKGLVERIGIDGSRIVLKVNGEGHVLEHEIKNHEIGLKLVLDLLTDEKYGNLKDLKEIDAVGHRVVHGGERFASSVKITDEVLKTIETLSFLAPLHNPANIMGIKSSMKVLPGVPQVAVFDTAFHQKMPEKAYLYAIPYEYYEKYKIRRYGFHGTSHRYVSKRAAEIMGKPYDQLKIITVHVGNGASVAAVKNGVSVDTSMGFTPLEGLVMGTRSGDIDPAIVEFLEKEEGLSAKEVVNALWKKSGVYGLTKGFSRDMRDIVLKAIEGDPVCRLALDVYYYRIAKYIGAYAAAMNGVDAIVFTAGVGENSPIMREEIIENYLGYLGIKIDKEANDFKGEEKIISTPDSKVIAMVVPTNEELMIAKDTKEIIEKGLDELKI

SEQ ID NO: 1295 - DNA, 1251 bp, synthetic construct
  misc_feature 1..1251: note = variant of acetate kinase from Marinitoga sp.38H-ov
  source 1..1251: mol_type = other DNA
atgcaccatcatcatcatcatggcggtagcggcatgaaagtgctggtgattaattctggtagctcctccatcaaatatcagctcctcgatatgcgcaacgaaaaggtattagcgaaaggcttggtcgaacgcattggcatcgacggttcgcgtatcgtgcttaaagttaacggcgaagggcacgtgctggaacatgagattaaaaatcacgaaattggacttaaattggtcctggatcttcttacggacgaaaaatacggtaacttgaaggatctcaaagaaatcgatgcagttgggcatcgcgtagtacatggcggcgagcgttttgccagtagcgtgaagattactgacgaagtcttaaagaccatcgagacgttgtcgttcttagctccgttacacaatccagcgaacattatgggtatcaagagcagcatgaaagtgttaccgggtgtgcctcaagttgccgtctttgatacagcgttccaccagaagatgccggagaaagcctatttgtacgcaatcccctatgagtactacgagaaatataaaattcgccgctatgggtttcatggaacctcacatcgttatgtgagtaaacgtgctgcggaaattatgggcaaaccgtacgatcagctcaagatcattaccgttcacgtgggtaacggcgcatcagttgcggcggtgaagaatggcgtatctgttgacacttccatgggtttcacaccacttgaaggtcttgtcatgggcacgcgcagcggcgatattgatccggccatcgtggaatttcttgagaaagaagaaggattgtcggccaaagaagtcgtcaacattctctggaagaaatctggtgtgtatgggctcaccaaaggcccgagtagggacatgcgtgacattgtgctgaaggctattgaaggtgatcctgtatgccgccttgcattagatgtgtattattatcgtatcgcgaaatatattggcgcatacgctgcggccatgaacggtgttgacgcgatcgtctttaccgcaggagttggcgaaaatagcccgattatgcgcgaagaaattattgagaactacttgggctacttagggatcaagatcgataaagaagccaatgacttcaaaggtgaggagaagatcatttcaacgcccgattccaaagtgattgcgatggtagttccgaccaacgaggagctcatgatcgccaaagacacgaaagaaatcattgagaaagggttggacgagcttaagatc

SEQ ID NO: 1296 - protein, 417 aa, synthetic construct
  REGION 1..417: note = variant of acetate kinase from Marinitoga sp.38H-ov
MHHHHHHGGSGMKVLVINSGSSSIKYQLLDMRNEKVLAKGLVERIGIDGSRIVLKVNGEGHVLEHEIKNHEIGLKLVLDLLTDEKYGNLKDLKEIDAVGHRVVHGGERFASSVKITDEVLKTIETLSFLAPLHNPANIMGIKSSMKVLPGVPQVAVFDTAFHQKMPEKAYLYAIPYEYYEKYKIRRYGFHGTSHRYVSKRAAEIMGKPYDQLKIITVHVGNGASVAAVKNGVSVDTSMGFTPLEGLVMGTRSGDIDPAIVEFLEKEEGLSAKEVVNILWKKSGVYGLTKGPSRDMRDIVLKAIEGDPVCRLALDVYYYRIAKYIGAYAAAMNGVDAIVFTAGVGENSPIMREEIIENYLGYLGIKIDKEANDFKGEEKIISTPDSKVIAMVVPTNEELMIAKDTKEIIEKGLDELKI

SEQ ID NO: 1297 - DNA, 1251 bp, synthetic construct
  misc_feature 1..1251: note = variant of acetate kinase from Marinitoga sp.38H-ov
  source 1..1251: mol_type = other DNA
atgcaccatcatcatcatcatggcggtagcggcatgaaagttctggtgattaattctggtagctcctccatcaaatatcagctcctcgatatgaccaacgaaaaggtattagcgaaaggcttggtcgaacgcattggcatcgacggttcgcgtatcgtgcataaagttaacggcgaagggcacgtgctggaacatgagattaaaaatcacgaaattggacttaaattggtcctggatcttcttacggacgaaaaatacggtgtgttgaaggatctcaaagaaatcgatgcagttgggcatcgcgtagtacatggcggcgagcgttttgccagtagcgtgaagattactgacgaagtcttaaagaccatcgagacgttgtcgttcttagctccgttacacaatccagcgaacattatgggtatcaagagcagcatgaaagtgttaccgggtgtgcctcaagttgccgtctttgatacagcgttccaccagaagatgccggagaaagcctatttgtacgcaatcccctatgagtactacgagaaatataaaattcgccgctatgggtttcatggaacctcacatcgttatgtgagtaaacgtgctgcggaaattatgggcaaaccgcgggatcagctcaagatcattaccgttcacgtgggtaacggcgcatcagttgcggcggtgaagaatggcgtatctgttgacacttccatgggtttcacaccacttgaaggtcttgtcatgggcacgcgcagcggcgatattgatccggccatcgtggaatttcttgagaaagaagaaggattgtcggccaaagaagtcgtcaacattctctggaagaaatctggtgtgtatgggctcaccaaaggctttagtagggacatgcgtgacattgtgctgaaggctattgaaggtgatcctgtatgccgccttgcattagatgtgtattattatcgtatcgcgaaatatattggcgcatacgctgcggccatgaacggtgttgacgcgatcgtctttaccgcaggagttggcgaaaatagcccgattatgcgcgaagaaattattgagaactacttgggctacttagggatcaagatcgataaagaagccaatgacttcaaaggtgaggagaagatcatttcaacgcccgattccaaagtgattgcgatggtagttccgaccaacgaggagctcatgatcgccaaagacacgaaagaaatcattgagaaagggttggacgagcttaagatc

SEQ ID NO: 1298 - protein, 417 aa, synthetic construct
  REGION 1..417: note = variant of acetate kinase from Marinitoga sp.38H-ov
MHHHHHHGGSGMKVLVINSGSSSIKYQLLDMTNEKVLAKGLVERIGIDGSRIVHKVNGEGHVLEHEIKNHEIGLKLVLDLLTDEKYGVLKDLKEIDAVGHRVVHGGERFASSVKITDEVLKTIETLSFLAPLHNPANIMGIKSSMKVLPGVPQVAVFDTAFHQKMPEKAYLYAIPYEYYEKYKIRRYGFHGTSHRYVSKRAAEIMGKPRDQLKIITVHVGNGASVAAVKNGVSVDTSMGFTPLEGLVMGTRSGDIDPAIVEFLEKEEGLSAKEVVNILWKKSGVYGLTKGFSRDMRDIVLKAIEGDPVCRLALDVYYYRIAKYIGAYAAAMNGVDAIVFTAGVGENSPIMREEIIENYLGYLGIKIDKEANDFKGEEKIISTPDSKVIAMVVPTNEELMIAKDTKEIIEKGLDELKI

SEQ ID NO: 1299 - DNA, 1251 bp, synthetic construct
  misc_feature 1..1251: note = variant of acetate kinase from Marinitoga sp.38H-ov
  source 1..1251: mol_type = other DNA
atgcaccatcatcatcatcatggcggtagcggcatgaaagtgctggtgattaattctggtagctcctccatcaaatatcagctcctcgatatgaccaacgaaaaggtattagcgaaaggcttggtcgaacgcattggcatcgacggttcgcgtatcgtgcttaaagttaacggcgaagggcacgtgctggaacatgagattaaaaatcacgaaattggacttaaattggtcctggatcttcttacggacgaaaaatacggtgtgttgaaggatctcaaagaaatcgatgcagttgggcatcgcgtagtacatggcggcgagcgttttgccagtagcgtgaagattactgacgaagtcttaaagaccatcgagacgttgtcgttcttagctccgttacacaatccagcgaacattatgggtatcaagagcagcatgaaagtgttaccgggtgtgcctcaagttgccgtctttgatacagcgttccaccagaagatgccggagaaagcctatttgtacgcaatcccctatgagtactacgagaaatataaaattcgccgctatgggtttcatggaacctcacatcgttatgtgagtaaacgtgctgcggaaattatgggcaaaccgctggatcagctcaagatcattaccgttcacgtgggtaacggcgcatcagttgcggcggtgaagaatggcgtatctgttgacacttccatgggtttcacaccacttgaaggtcttgtcatgggcacgcgcagcggcgatattgatccggccatcgtggaatttcttgagaaagaagaaggattgtcggccaaagaagtcgtcaacattctctggaagaaatctggtgtgtatgggctcaccaaaggctttagtagggacatgcgtgacattgtgctgaaggctattgaaggtgatcctgtatgccgccttgcattagatgtgtattattatcgtatcgcgaaatatattggcgcatacgctgcggccatgaacggtgttgacgcgatcgtctttaccgcaggagttggcgaaaatagcccgattatgcgcgaagaaattattgagaactacttgggctacttagggatcaagatcgataaagaagccaatgacttcaaaggtgaggagaagatcatttcaacgcccgattccaaagtgattgcgatggtagttccgaccaacgaggagctcatgatcgccaaagacacgaaagaaatcattgagaaagggttggacgagcttaagatc

SEQ ID NO: 1300 - protein, 417 aa, synthetic construct
  REGION 1..417: note = variant of acetate kinase from Marinitoga sp.38H-ov
MHHHHHHGGSGMKVLVINSGSSSIKYQLLDMTNEKVLAKGLVERIGIDGSRIVLKVNGEGHVLEHEIKNHEIGLKLVLDLLTDEKYGVLKDLKEIDAVGHRVVHGGERFASSVKITDEVLKTIETLSFLAPLHNPANIMGIKSSMKVLPGVPQVAVFDTAFHQKMPEKAYLYAIPYEYYEKYKIRRYGFHGTSHRYVSKRAAEIMGKPLDQLKIITVHVGNGASVAAVKNGVSVDTSMGFTPLEGLVMGTRSGDIDPAIVEFLEKEEGLSAKEVVNILWKKSGVYGLTKGFSRDMRDIVLKAIEGDPVCRLALDVYYYRIAKYIGAYAAAMNGVDAIVFTAGVGENSPIMREEIIENYLGYLGIKIDKEANDFKGEEKIISTPDSKVIAMVVPTNEELMIAKDTKEIIEKGLDELKI

SEQ ID NO: 1301 - DNA, 1251 bp, synthetic construct
  misc_feature 1..1251: note = variant of acetate kinase from Marinitoga sp.38H-ov
  source 1..1251: mol_type = other DNA
atgcaccatcatcatcatcatggcggtagcggcatgaaagttctggtgattaattctggtagctcctccatcaaatatcagctcctcgatatgaccaacgaaaaggtattagcgaaaggcttggtcgaacgcattggcatcgacggttcgcgtatcgtgcataaagttaacggcgaagggcacgtgctggaacatgagattaaaaatcacgaaattggacttaaattggtcctggatcttcttacggacgaaaaatacggtgtgttgaaggatctcaaagaaatcgatgcagttgggcatcgcgtagtacatggcggcgagcgttttgccagtagcgtgaagattactgacgaagtcttaaagaccatcgagacgttgtcgttcttagctccgttacacaatccagcgaacattatgggtatcaagagcagcatgaaagtgttaccgggtgtgcctcaagttgccgtctttgatacagcgttccaccagaagatgccggagaaagcctatttgtacgcaatcccctatgagtactacgagaaatataaaattcgccgctatgggtttcatggaacctcacatcgttatgtgagtaaacgtgctgcggaaattatgggcaaaccgcgggatcagctcaagatcattaccgttcacgtgggtaacggcgcatcagttgcggcggtgaagaatggcgtatctgttgacacttccatgggtttcacaccacttgaaggtcttgtcatgggcacgcgcagcggcgatattgatccggccatcgtggaatttcttgagaaagaagaaggattgtcggccaaagaagtcgtcaacatcctctggaagaaatctggtgtgtatgggctcaccaaaggcccgagtagggacatgcgtgacattgtgctgaaggctattgaaggtgatcctgtatgccgccttgcattagatgtgtattattatcgtatcgcgaaatatattggcgcatacgctgcggccatgaacggtgttgacgcgatcgtctttaccgcaggagttggcgaaaatagcccgattatgcgcgaagaaattattgagaactacttgggctacttagggatcaagatcgataaagaagccaatgacttcaaaggtgaggagaagatcatttcaacgcccgattccaaagtgattgcgatggtagttccgaccaacgaggagctcatgatcgccaaagacacgaaagaaatcattgagaaagggttggacgagcttaagatc

SEQ ID NO: 1302 - protein, 417 aa, synthetic construct
  REGION 1..417: note = variant of acetate kinase from Marinitoga sp.38H-ov
MHHHHHHGGSGMKVLVINSGSSSIKYQLLDMTNEKVLAKGLVERIGIDGSRIVHKVNGEGHVLEHEIKNHEIGLKLVLDLLTDEKYGVLKDLKEIDAVGHRVVHGGERFASSVKITDEVLKTIETLSFLAPLHNPANIMGIKSSMKVLPGVPQVAVFDTAFHQKMPEKAYLYAIPYEYYEKYKIRRYGFHGTSHRYVSKRAAEIMGKPRDQLKIITVHVGNGASVAAVKNGVSVDTSMGFTPLEGLVMGTRSGDIDPAIVEFLEKEEGLSAKEVVNILWKKSGVYGLTKGPSRDMRDIVLKAIEGDPVCRLALDVYYYRIAKYIGAYAAAMNGVDAIVFTAGVGENSPIMREEIIENYLGYLGIKIDKEANDFKGEEKIISTPDSKVIAMVVPTNEELMIAKDTKEIIEKGLDELKI

SEQ ID NO: 1303 - DNA, 1251 bp, synthetic construct
  misc_feature 1..1251: note = variant of acetate kinase from Marinitoga sp.38H-ov
  source 1..1251: mol_type = other DNA
atgcaccatcatcatcatcatggcggtagcggcatgaaagttctggtgattaatcagggtagcagctccatcaaatatcagctcctcgatatgaccaacgaaaaggtattagcgaaaggcttggtcgaacgcattggcatcgacggttcgcgtatcgtgcataaagttaacggcgaagggcacgtgctggaacatgagattaaaaatcacgaaattggacttaaattggtcctggatcttcttacggacgaaaaatacggtgtgttgaaggatctcaaagaaatcgatgcagttgggcatcgcgtagtacatggcggcgagcgttttgccagtagcgtgaagattactgacgaagtcttaaagaccatcgagacgttgttgttcttagctccgttacacaatccagcgaacattatgggtatcaagagcagcatgaaagtgttaccgggtgtgcctcaagttgccgtctttgatacagcgttccaccagaagatgccggagaaagcctatttgtacgcaatcccctatgagtactacgagaaatataaaattcgccgctatgggtttcatggaacctcacatcgttatgtgagtaaacgtgctgcggaaattatgggcaaaccgtacgatcagctcaagatcattaccgttcacgtgggtaacggcgcatcagttgcggcggtgaagaatggcgtatctgttgacacttccatgggtttcacaccacttgaaggtcttgtcatgggcacgcgcagcggcgatattgatccggccatcgtggaatttcttgagaaagaagaaggattgtcggccaaagaagtcgtcaacatcctctggaagaaatctggtgtgtatgggctcaccaaaggctttagtagggacatgcgtgatattgtgctgaaggctattgaaggtgatcctgtatgccgccttgcattagatgtgtattattatcgtatcgcgaaatatattggcgcatacgctgcggccatgaacggtgttgacgcgatcgtctttaccgcaggagttggcgaaaatagcccgattatgcgcgaagaaattattgagaactacttgggctacttagggatcaagatcgataaagaagccaatgacttcaaaggtgaggagaagatcatttcaacgcccgattccaaagtgattgcgatggtagttccgaccaacgaggagctcatgatcgccaaagacacgaaagaaatcattgagaaagggttggacgagcttaagatc

SEQ ID NO: 1304 - protein, 417 aa, synthetic construct
  REGION 1..417: note = variant of acetate kinase from Marinitoga sp.38H-ov
MHHHHHHGGSGMKVLVINQGSSSIKYQLLDMTNEKVLAKGLVERIGIDGSRIVHKVNGEGHVLEHEIKNHEIGLKLVLDLLTDEKYGVLKDLKEIDAVGHRVVHGGERFASSVKITDEVLKTIETLLFLAPLHNPANIMGIKSSMKVLPGVPQVAVFDTAFHQKMPEKAYLYAIPYEYYEKYKIRRYGFHGTSHRYVSKRAAEIMGKPYDQLKIITVHVGNGASVAAVKNGVSVDTSMGFTPLEGLVMGTRSGDIDPAIVEFLEKEEGLSAKEVVNILWKKSGVYGLTKGFSRDMRDIVLKAIEGDPVCRLALDVYYYRIAKYIGAYAAAMNGVDAIVFTAGVGENSPIMREEIIENYLGYLGIKIDKEANDFKGEEKIISTPDSKVIAMVVPTNEELMIAKDTKEIIEKGLDELKI

SEQ ID NO: 1305 - DNA, 1251 bp, synthetic construct
  misc_feature 1..1251: note = variant of acetate kinase from Marinitoga sp.38H-ov
  source 1..1251: mol_type = other DNA
atgcaccatcatcatcatcatggcggtagcggcatgaaagttctggtgattaattctggtagctcctccatcaaatatcagctcctcgatatgaccaacgaaaaggtattagcgaaaggcttggtcgaacgcattggcatcgacggttcgcgtatcgtgcataaagttaacggcgaagggcacgtgctggaacatgagattaaaaatcacgaaattggacttaaattggtcctggatcttcttacggacgaaaaatacggtgtgttgaaggatctcaaagaaatcgatgcagttgggcatcgcgtagtacatggcggcgagcgttttgccagtagcgtgaagattactgacgaagtcttaaagaccatcgagacgttgtcgttcttagctccgttacacaatccagcgaacattatgggtatcaagagcagcatgaaagtgttaccgggtgtgcctcaagttgccgtctttgatacagcgttccaccagaagatgccggagaaagcctatttgtacgcaatcccctatgagtactacgagaaatataaaattcgccgctatgggtttcatggaacctcacatcgttatgtgagtaaacgtgctgcggaaattatgggcaaaccgtacgatcagctcaagatcattaccgttcacgtgggtaacggcgcatcagttgcggcggtgaagaatggcgtatctgttgacacttccatgggtttcacaccacttgaaggtcttgtcatgggcacgcgcagcggcgatattgatccggccatcgtggaatttcttgagaaagaagaaggattgtcggccaaagaagtcgtcaacattctctggaagaaatctggtgtgtatgggctcaccaaaggcccgagtagggacatgcgtgacattgtgctgaaggctattgaaggtgatcctgtatgccgccttgcattagatgtgtattattatcgtatcgcgaaatatattggcgcatacgctgcggccatgaacggtgttgacgcgatcgtctttaccgcaggagttggcgaaaatagcccgattatgcgcgaagaaattattgagaactacttgggctacttagggatcaagatcgataaagaagccaatgacttcaaaggtgaggagaagatcatttcaacgcccgattccaaagtgattgcgatggtagttccgaccaacgaggagctcatgatcgccaaagacacgaaagaaatcattgagaaagggttggacgagcttaagatc

SEQ ID NO: 1306 - protein, 417 aa, synthetic construct
  REGION 1..417: note = variant of acetate kinase from Marinitoga sp.38H-ov
MHHHHHHGGSGMKVLVINSGSSSIKYQLLDMTNEKVLAKGLVERIGIDGSRIVHKVNGEGHVLEHEIKNHEIGLKLVLDLLTDEKYGVLKDLKEIDAVGHRVVHGGERFASSVKITDEVLKTIETLSFLAPLHNPANIMGIKSSMKVLPGVPQVAVFDTAFHQKMPEKAYLYAIPYEYYEKYKIRRYGFHGTSHRYVSKRAAEIMGKPYDQLKIITVHVGNGASVAAVKNGVSVDTSMGFTPLEGLVMGTRSGDIDPAIVEFLEKEEGLSAKEVVNILWKKSGVYGLTKGPSRDMRDIVLKAIEGDPVCRLALDVYYYRIAKYIGAYAAAMNGVDAIVFTAGVGENSPIMREEIIENYLGYLGIKIDKEANDFKGEEKIISTPDSKVIAMVVPTNEELMIAKDTKEIIEKGLDELKI

SEQ ID NO: 1307 - DNA, 1251 bp, synthetic construct
  misc_feature 1..1251: note = variant of acetate kinase from Marinitoga sp.38H-ov
  source 1..1251: mol_type = other DNA
atgcaccatcatcatcatcatggcggtagcggcatgaaagtgctggtgattaattctggtagctcctccatcaaatatcagctcctcgatatgaccaacgaaaaggtattagcgaaaggcttggtcgaacgcattggcatcgacggttcgcgtatcgtgcataaagttaacggcgaagggcacgtgctggaacatgagattaaaaatcacgaaattggacttaaattggtcctggatcttcttacggacgaaaaatacggtccgttgaaggatctcaaagaaatcgatgcagttgggcatcgcgtagtacatggcggcgagcgttttgccagtagcgtgaagattactgacgaagtcttaaagaccatcgagacgttgtcgttcttagctccgttacacaatccagcgaacattatgggtatcaagagcagcatgaaagtgttaccgggtgtgcctcaagttgccgtctttgatacagcgttccaccagaagatgccggagaaagcctatttgtacgcaatcccctatgagtactacgagaaatataaaattcgccgctatgggtttcatggaacctcacatcgttatgtgagtaaacgtgctgcggaaattatgggcaaaccgtatgatcagctcaagatcattaccgttcacgtgggtaacggcgcatcagttgcggcggtgaagaatggcgtatctgttgacacttccatgggtttcacaccacttgaaggtcttgtcatgggcacgcgcagcggcgatattgatccggccatcgtggaatttcttgagaaagaagaaggattgtcggccaaagaagtcgtcaacgcgctctggaagaaatctggtgtgtatgggctcaccaaaggctttagtagggacatgcgtgacattgtgctgaaggctattgaaggtgatcctgtatgccgccttgcattagatgtgtattattatcgtatcgcgaaatatattggcgcatacgctgcggccatgaacggtgttgacgcgatcgtctttaccgcaggagttggcgaaaatagcccgattatgcgcgaagaaattattgagaactacttgggctacttagggatcaagatcgataaagaagccaatgacttcaaaggtgaggagaagatcatttcaacgcccgattccaaagtgattgcgatggtagttccgaccaacgaggagctcatgatcgccaaagacacgaaagaaatcattgagaaagggttggacgagcttaagatc

SEQ ID NO: 1308 - protein, 417 aa, synthetic construct
  REGION 1..417: note = variant of acetate kinase from Marinitoga sp.38H-ov
MHHHHHHGGSGMKVLVINSGSSSIKYQLLDMTNEKVLAKGLVERIGIDGSRIVHKVNGEGHVLEHEIKNHEIGLKLVLDLLTDEKYGPLKDLKEIDAVGHRVVHGGERFASSVKITDEVLKTIETLSFLAPLHNPANIMGIKSSMKVLPGVPQVAVFDTAFHQKMPEKAYLYAIPYEYYEKYKIRRYGFHGTSHRYVSKRAAEIMGKPYDQLKIITVHVGNGASVAAVKNGVSVDTSMGFTPLEGLVMGTRSGDIDPAIVEFLEKEEGLSAKEVVNALWKKSGVYGLTKGFSRDMRDIVLKAIEGDPVCRLALDVYYYRIAKYIGAYAAAMNGVDAIVFTAGVGENSPIMREEIIENYLGYLGIKIDKEANDFKGEEKIISTPDSKVIAMVVPTNEELMIAKDTKEIIEKGLDELKI

SEQ ID NO: 1309 - DNA, 1251 bp, synthetic construct
  misc_feature 1..1251: note = variant of acetate kinase from Marinitoga sp.38H-ov
  source 1..1251: mol_type = other DNA
atgcaccatcatcatcatcatggcggtagcggcatgaaagtgctggtgattaattctggtagctcctccatcaaatatcagctcctcgatatgaccaacgaaaaggtattagcgaaaggcttggtcgaacgcattggcatcgacggttcgcgtatcgtgcataaagttaacggcgaagggcacgtgctggaacatgagattaaaaatcacgaaattggacttaaattggtcctggatcttcttacggacgaaaaatacggtccgttgaaggatctcaaagaaatcgatgcagttgggcatcgcgtagtacatggcggcgagcgttttgccagtagcgtgaagattactgacgaagtcttaaagaccatcgagacgttgtcgttcttagctccgttacacaatccagcgaacattatgggtatcaagagcagcatgaaagtgttaccgggtgtgcctcaagttgccgtctttgatacagcgttccaccagaagatgccggagaaagcctatttgtacgcaatcccctatgagtactacgagaaatataaaattcgccgctatgggtttcatggaacctcacatcgttatgtgagtaaacgtgctgcggaaattatgggcaaaccgtacgatcagctcaagatcattaccgttcacgtgggtaacggcgcatcagttgcggcggtgaagaatggcgtatctgttgacacttccatgggtttcacaccacttgaaggtcttgtcatgggcacgcgcagcggcgatattgatccggccatcgtggaatttcttgagaaagaagaaggattgtcggccaaagaagtcgtcaacatcctctggaagaaatctggtgtgtatgggctcaccaaaggctttagtagggacatgcgtgacattgtgctgaaggctattgaaggtgatcctgtatgccgccttgcattagatgtgtattattatcgtatcgcgaaatatattggcgcatacgctgcggccatgaacggtgttgacgcgatcgtctttaccgcaggagttggcgaaaatagcccgattatgcgcgaagaaattattgagaactacttgggctacttagggatcaagatcgataaagaagccaatgacttcaaaggtgaggagaagatcatttcaacgcccgattccaaagtgattgcgatggtagttccgaccaacgaggagctcatgatcgccaaagacacgaaagaaatcattgagaaagggttggacgagcttaagatc

SEQ ID NO: 1310 - protein, 417 aa, synthetic construct
  REGION 1..417: note = variant of acetate kinase from Marinitoga sp.38H-ov
MHHHHHHGGSGMKVLVINSGSSSIKYQLLDMTNEKVLAKGLVERIGIDGSRIVHKVNGEGHVLEHEIKNHEIGLKLVLDLLTDEKYGPLKDLKEIDAVGHRVVHGGERFASSVKITDEVLKTIETLSFLAPLHNPANIMGIKSSMKVLPGVPQVAVFDTAFHQKMPEKAYLYAIPYEYYEKYKIRRYGFHGTSHRYVSKRAAEIMGKPYDQLKIITVHVGNGASVAAVKNGVSVDTSMGFTPLEGLVMGTRSGDIDPAIVEFLEKEEGLSAKEVVNILWKKSGVYGLTKGFSRDMRDIVLKAIEGDPVCRLALDVYYYRIAKYIGAYAAAMNGVDAIVFTAGVGENSPIMREEIIENYLGYLGIKIDKEANDFKGEEKIISTPDSKVIAMVVPTNEELMIAKDTKEIIEKGLDELKI

SEQ ID NO: 1311 - DNA, 1251 bp, synthetic construct
  misc_feature 1..1251: note = variant of acetate kinase from Marinitoga sp.38H-ov
  source 1..1251: mol_type = other DNA
atgcaccatcatcatcatcatggcggtagcggcatgaaagttctggtgattaattctggtagctcctccatcaaatatcagctcctcgatatgcgcaacgaaaaggtattagcgaaaggcttggtcgaacgcattggcatcgacggttcgcgtatcgtgcataaagttaacggcgaagggcacgtgctggaacatgagattaaaaatcacgaaattggacttaaattggtcctggatcttcttacggacgaaaaatacggtgtgttgaaggatctcaaagaaatcgatgcagttgggcatcgcgtagtacatggcggcgagcgttttgccagtagcgtgaagattactgacgaagtcttaaagaccatcgagacgttgtcgttcttagctccgttacacaatccagcgaacattatgggtatcaagagcagcatgaaagtgttaccgggtgtgcctcaagttgccgtctttgatacagcgttccaccagaagatgccggagaaagcctatttgtacgcaatcccctatgagtactacgagaaatataaaattcgccgctatgggtttcatggaacctcacatcgttatgtgagtaaacgtgctgcggaaattatgggcaaaccgctggatcagctcaagatcattaccgttcacgtgggtaacggcgcatcagttgcggcggtgaagaatggcgtatctgttgacacttccatgggtttcacaccacttgaaggtcttgtcatgggcacgcgcagcggcgatattgatccggccatcgtggaatttcttgagaaagaagaaggattgtcggccaaagaagtcgtcaacatcctctggaagaaatctggtgtgtatgggctcaccaaaggctttagtagggacatgcgtgacattgtgctgaaggctattgaaggtgatcctgtatgccgccttgcattagatgtgtattattatcgtatcgcgaaatatattggcgcatacgctgcggccatgaacggtgttgacgcgatcgtctttaccgcaggagttggcgaaaatagcccgattatgcgcgaagaaattattgagaactacttgggctacttagggatcaagatcgataaagaagccaatgacttcaaaggtgaggagaagatcatttcaacgcccgattccaaagtgattgcgatggtagttccgaccaacgaggagctcatgatcgccaaagacacgaaagaaatcattgagaaagggttggacgagcttaagatc

SEQ ID NO: 1312 - protein, 417 aa, synthetic construct
  REGION 1..417: note = variant of acetate kinase from Marinitoga sp.38H-ov
MHHHHHHGGSGMKVLVINSGSSSIKYQLLDMRNEKVLAKGLVERIGIDGSRIVHKVNGEGHVLEHEIKNHEIGLKLVLDLLTDEKYGVLKDLKEIDAVGHRVVHGGERFASSVKITDEVLKTIETLSFLAPLHNPANIMGIKSSMKVLPGVPQVAVFDTAFHQKMPEKAYLYAIPYEYYEKYKIRRYGFHGTSHRYVSKRAAEIMGKPLDQLKIITVHVGNGASVAAVKNGVSVDTSMGFTPLEGLVMGTRSGDIDPAIVEFLEKEEGLSAKEVVNILWKKSGVYGLTKGFSRDMRDIVLKAIEGDPVCRLALDVYYYRIAKYIGAYAAAMNGVDAIVFTAGVGENSPIMREEIIENYLGYLGIKIDKEANDFKGEEKIISTPDSKVIAMVVPTNEELMIAKDTKEIIEKGLDELKI

SEQ ID NO: 1313 - DNA, 1251 bp, synthetic construct
  misc_feature 1..1251: note = variant of acetate kinase from Marinitoga sp.38H-ov
  source 1..1251: mol_type = other DNA
atgcaccatcatcatcatcatggcggtagcggcatgaaagttctggtgattaattctggtagctcctccatcaaatatcagctcctcgatatgaccaacgaaaaggtattagcgaaaggcttggtcgaacgcattggcatcgacggttcgcgtatcgtgcataaagttaacggcgaagggcacgtgctggaacatgagattaaaaatcacgaaattggacttaaattggtcctggatcttcttacggacgaaaaatacggtgtgttgaaggatctcaaagaaatcgatgcagttgggcatcgcgtagtacatggcggcgagcgttttgccagtagcgtgaagattactgacgaagtcttaaagaccatcgagacgttgttgttcttagctccgttacacaatccagcgaacattatgggtatcaagagcagcatgaaagtgttaccgggtgtgcctcaagttgccgtctttgatacagcgttccaccagaagatgccggagaaagcctatttgtacgcaatcccctatgagtactacgagaaatataaaattcgccgctatgggtttcatggaacctcacatcgttatgtgagtaaacgtgctgcggaaattatgggcaaaccgtacgatcagctcaagatcattaccgttcacgtgggtaacggcgcatcagttgcggcggtgaagaatggcgtatctgttgacacttccatgggtttcacaccacttgaaggtcttgtcatgggcacgcgcagcggcgatattgatccggccatcgtggaatttcttgagaaagaagaaggattgtcggccaaagaagtcgtcaacatcctctggaagaaatctggtgtgcgcgggctcaccaaaggctttagtagggacatgcgtgacattgtgctgaaggctattgaaggtgatcctgtatgccgccttgcattagatgtgtattattatcgtatcgcgaaatatattggcgcatacgctgcggccatgaacggtgttgacgcgatcgtctttaccgcaggagttggcgaaaatagcccgattatgcgcgaagaaattattgagaactacttgggctacttagggatcaagatcgataaagaagccaatgacttcaaaggtgaggagaagatcatttcaacgcccgattccaaagtgattgcgatggtagttccgaccaacgaggagctcatgatcgccaaagacacgaaagaaatcattgagaaagggttggacgagcttaagatc

SEQ ID NO: 1314 - protein, 417 aa, synthetic construct
  REGION 1..417: note = variant of acetate kinase from Marinitoga sp.38H-ov
MHHHHHHGGSGMKVLVINSGSSSIKYQLLDMTNEKVLAKGLVERIGIDGSRIVHKVNGEGHVLEHEIKNHEIGLKLVLDLLTDEKYGVLKDLKEIDAVGHRVVHGGERFASSVKITDEVLKTIETLLFLAPLHNPANIMGIKSSMKVLPGVPQVAVFDTAFHQKMPEKAYLYAIPYEYYEKYKIRRYGFHGTSHRYVSKRAAEIMGKPYDQLKIITVHVGNGASVAAVKNGVSVDTSMGFTPLEGLVMGTRSGDIDPAIVEFLEKEEGLSAKEVVNILWKKSGVRGLTKGFSRDMRDIVLKAIEGDPVCRLALDVYYYRIAKYIGAYAAAMNGVDAIVFTAGVGENSPIMREEIIENYLGYLGIKIDKEANDFKGEEKIISTPDSKVIAMVVPTNEELMIAKDTKEIIEKGLDELKI

SEQ ID NO: 1315 - DNA, 1251 bp, synthetic construct
  misc_feature 1..1251: note = variant of acetate kinase from Marinitoga sp.38H-ov
  source 1..1251: mol_type = other DNA
atgcaccatcatcatcatcatggcggtagcggcatgaaagttctggtgattaattctggtagctcctccatcaaatatcagctcctcgatatgcgcaacgaaaaggtattagcgaaaggcttggtcgaacgcattggcatcgacggttcgcgtatcgtgcataaagttaacggcgaagggcacgtgctggaacatgagattaaaaatcacgaaattggacttaaattggtcctggatcttcttacggacgaaaaatacggtaacttgaaggatctcaaagaaatcgatgcagttgggcatcgcgtagtacatggcggcgagcgttttgccagtagcgtgaagattactgacgaagtcttaaagaccatcgagacgttgtcgttcttagctccgttacacaatccagcgaacattatgggtatcaagagcagcatgaaagtgttaccgggtgtgcctcaagttgccgtctttgatacagcgttccaccagaagatgccggagaaagcctatttgtacgcaatcccctatgagtactacgagaaatataaaattcgccgctatgggtttcatggaacctcacatcgttatgtgagtaaacgtgctgcggaaattatgggcaaaccgctggatcagctcaagatcattaccgttcacgtgggtaacggcgcatcagttgcggcggtgaagaatggcgtatctgttgacacttccatgggtttcacaccacttgaaggtcttgtcatgggcacgcgcagcggcgatattgatccggccatcgtggaatttcttgagaaagaagaaggattgtcggccaaagaagtcgtcaacatcctctggaagaaatctggtgtgtatgggctcaccaaaggctttagtagggacatgcgtgacattgtgctgaaggctattgaaggtgatcctgtatgccgccttgcattagatgtgtattattatcgtatcgcgaaatatattggcgcatacgctgcggccatgaacggtgttgacgcgatcgtctttaccgcaggagttggcgaaaatagcccgattatgcgcgaagaaattattgagaactacttgggctacttagggatcaagatcgataaagaagccaatgacttcaaaggtgaggagaagatcatttcaacgcccgattccaaagtgattgcgatggtagttccgaccaacgaggagctcatgatcgccaaagacacgaaagaaatcattgagaaagggttggacgagcttaagatc

SEQ ID NO: 1316 - protein, 417 aa, synthetic construct
  REGION 1..417: note = variant of acetate kinase from Marinitoga sp.38H-ov
MHHHHHHGGSGMKVLVINSGSSSIKYQLLDMRNEKVLAKGLVERIGIDGSRIVHKVNGEGHVLEHEIKNHEIGLKLVLDLLTDEKYGNLKDLKEIDAVGHRVVHGGERFASSVKITDEVLKTIETLSFLAPLHNPANIMGIKSSMKVLPGVPQVAVFDTAFHQKMPEKAYLYAIPYEYYEKYKIRRYGFHGTSHRYVSKRAAEIMGKPLDQLKIITVHVGNGASVAAVKNGVSVDTSMGFTPLEGLVMGTRSGDIDPAIVEFLEKEEGLSAKEVVNILWKKSGVYGLTKGFSRDMRDIVLKAIEGDPVCRLALDVYYYRIAKYIGAYAAAMNGVDAIVFTAGVGENSPIMREEIIENYLGYLGIKIDKEANDFKGEEKIISTPDSKVIAMVVPTNEELMIAKDTKEIIEKGLDELKI

SEQ ID NO: 1317 - DNA, 1251 bp, synthetic construct
  misc_feature 1..1251: note = variant of acetate kinase from Marinitoga sp.38H-ov
  source 1..1251: mol_type = other DNA
atgcaccatcatcatcatcatggcggtagcggcatgaaaatgctggtgattaattctggtagctcctccatcaaatatcagctcctcgatatgaccaacgaaaaggtattagcgaaaggcttggtcgaacgcattggcatcgacggttcgcgtatcgtgcttaaagttaacggcgaagggcacgtgctggaacatgagattaaaaatcacgaaattggacttaaattggtcctggatcttcttacggacgaaaaatacggtgtgttgaaggatctcaaagaaatcgatgcagttgggcatcgcgtagtacatggcggcgagcgttttgccagtagcgtgaagattactgacgaagtcttaaagaccatcgagacgttgtcgttcttagctccgttacacaatccagcgaacattatgggtatcaagagcagcatgaaagtgttaccgggtgtgcctcaagttgccgtctttgatacagcgttccaccagaagatgccggagaaagcctatttgtacgcaatcccctatgagtactacgagaaatataaaattcgccgctatgggtttcatggaacctcacatcgttatgtgagtaaacgtgctgcggaaattatgggcaaaccgtatgatcagctcaagatcattaccgttcacgtgggtaacggcgcatcagttgcggcggtgaagaatggcgtatctgttgacacttccatgggtttcacaccacttgaaggtcttgtcatgggcacgcgcagcggcgatattgatccggccatcgtggaatttcttgagaaagaagaaggattgtcggccaaagaagtcgtcaacattctctggaagaaatctggtgtgtatgggctcaccaaaggcccgagtagggacatgcgtgacattgtgctgaaggctattgaaggtgatcctgtatgccgccttgcattagatgtgtattattatcgtatcgcgaaatatattggcgcatacgctgcggccatgaacggtgttgacgcgatcgtctttaccgcaggagttggcgaaaatagcccgattatgcgcgaagaaattattgagaactacttgggctacttagggatcaagatcgataaagaagccaatgacttcaaaggtgaggagaagatcatttcaacgcccgattccaaagtgattgcgatggtagttccgaccaacgaggagctcatgatcgccaaagacacgaaagaaatcattgagaaagggttggacgagcttaagatc

SEQ ID NO: 1318 - protein, 417 aa, synthetic construct
  REGION 1..417: note = variant of acetate kinase from Marinitoga sp.38H-ov
MHHHHHHGGSGMKMLVINSGSSSIKYQLLDMTNEKVLAKGLVERIGIDGSRIVLKVNGEGHVLEHEIKNHEIGLKLVLDLLTDEKYGVLKDLKEIDAVGHRVVHGGERFASSVKITDEVLKTIETLSFLAPLHNPANIMGIKSSMKVLPGVPQVAVFDTAFHQKMPEKAYLYAIPYEYYEKYKIRRYGFHGTSHRYVSKRAAEIMGKPYDQLKIITVHVGNGASVAAVKNGVSVDTSMGFTPLEGLVMGTRSGDIDPAIVEFLEKEEGLSAKEVVNILWKKSGVYGLTKGPSRDMRDIVLKAIEGDPVCRLALDVYYYRIAKYIGAYAAAMNGVDAIVFTAGVGENSPIMREEIIENYLGYLGIKIDKEANDFKGEEKIISTPDSKVIAMVVPTNEELMIAKDTKEIIEKGLDELKI

SEQ ID NO: 1319 - DNA, 1251 bp, synthetic construct
  misc_feature 1..1251: note = variant of acetate kinase from Marinitoga sp.38H-ov
  source 1..1251: mol_type = other DNA
atgcaccatcatcatcatcatggcggtagcggcatgaaaatgctggtgattaattctggtagctcctccatcaaatatcagctcctcgatatgaccaacgaaaaggtattagcgaaaggcttggtcgaacgcattggcatcgacggttcgcgtatcgtgcataaagttaacggcgaagggcacgtgctggaacatgagattaaaaatcacgaaattggacttaaattggtcctggatcttcttacggacgaaaaatacggtccgttgaaggatctcaaagaaatcgatgcagttgggcatcgcgtagtacatggcggcgagcgttttgccagtagcgtgaagattactgacgaagtcttaaagaccatcgagacgttgtcgttcttagctccgttacacaatccagcgaacattatgggtatcaagagcagcatgaaagtgttaccgggtgtgcctcaagttgccgtctttgatacagcgttccaccagaagatgccggagaaagcctatttgtacgcaatcccctatgagtactacgagaaatataaaattcgccgctatgggtttcatggaacctcacatcgttatgtgagtaaacgtgctgcggaaattatgggcaaaccgtacgatcagctcaagatcattaccgttcacgtgggtaacggcgcatcagttgcggcggtgaagaatggcgtatctgttgacacttccatgggtttcacaccacttgaaggtcttgtcatgggcacgcgcagcggcgatattgatccggccatcgtggaatttcttgagaaagaagaaggattgtcggccaaagaagtcgtcaacatcctctggaagaaatctggtgtgtatgggctcaccaaaggctttagtagggacatgcgtgacattgtgctgaaggctattgaaggtgatcctgtatgccgccttgcattagatgtgtattattatcgtatcgcgaaatatattggcgcatacgctgcggccatgaacggtgttgacgcgatcgtctttaccgcaggagttggcgaaaatagcccgattatgcgcgaagaaattattgagaactacttgggctacttagggatcaagatcgataaagaagccaatgacttcaaaggtgaggagaagatcatttcaacgcccgattccaaagtgattgcgatggtagttccgaccaacgaggagctcatgatcgccaaagacacgaaagaaatcattgagaaagggttggacgagcttaagatc

SEQ ID NO: 1320 - protein, 417 aa, synthetic construct
  REGION 1..417: note = variant of acetate kinase from Marinitoga sp.38H-ov
MHHHHHHGGSGMKMLVINSGSSSIKYQLLDMTNEKVLAKGLVERIGIDGSRIVHKVNGEGHVLEHEIKNHEIGLKLVLDLLTDEKYGPLKDLKEIDAVGHRVVHGGERFASSVKITDEVLKTIETLSFLAPLHNPANIMGIKSSMKVLPGVPQVAVFDTAFHQKMPEKAYLYAIPYEYYEKYKIRRYGFHGTSHRYVSKRAAEIMGKPYDQLKIITVHVGNGASVAAVKNGVSVDTSMGFTPLEGLVMGTRSGDIDPAIVEFLEKEEGLSAKEVVNILWKKSGVYGLTKGFSRDMRDIVLKAIEGDPVCRLALDVYYYRIAKYIGAYAAAMNGVDAIVFTAGVGENSPIMREEIIENYLGYLGIKIDKEANDFKGEEKIISTPDSKVIAMVVPTNEELMIAKDTKEIIEKGLDELKI

SEQ ID NO: 1321 - DNA, 1251 bp, synthetic construct
  misc_feature 1..1251: note = variant of acetate kinase from Marinitoga sp.38H-ov
  source 1..1251: mol_type = other DNA
atgcaccatcatcatcatcatggcggtagcggcatgaaagttctggtgattaattctggtagctcctccatcaaatatcagctcctcgatatgaccaacgaaaaggtattagcgaaaggcttggtcgaacgcattggcatcgacggttcgcgtatcgtgcataaagttaacggcgaagggcacgtgctggaacatgagattaaaaatcacgaaattggacttaaattggtcctggatcttcttacggacgaaaaatacggtgtgttgaaggatctcaaagaaatcgatgcagttgggcatcgcgtagtacatggcggcgagcgttttgccagtagcgtgaagattactgacgaagtcttaaagaccatcgagacgttgtcgttcttagctccgttacacaatccagcgaacattatgggtatcaagagcagcatgaaagtgttaccgggtgtgcctcaagttgccgtctttgatacagcgttccaccagaagatgccggagaaagcctatttgtacgcaatcccctatgagtactacgagaaatataaaattcgccgctatgggtttcatggaacctcacatcgttatgtgagtaaacgtgctgcggaaattatgggcaaaccgtacgatcagctcaagatcattaccgttcacgtgggtaacggcgcatcagttgcggcggtgaagaatggcgtatctgttgacacttccatgggtttcacaccacttgaaggtcttgtcatgggcacgcgcagcggcgatattgatccggccatcgtggaatttcttgagaaagaagaaggattgtcggccaaagaagtcgtcaacatcctctggaagaaatctggtgtgcgcgggctcaccaaaggctttagtagggacatgcgtgacattgtgcggaaggctattgaaggtgatcctgtatgccgccttgcattagatgtgtattattatcgtatcgcgaaatatattggcgcatacgctgcggccatgaacggtgttgacgcgatcgtctttaccgcaggagttggcgaaaatagcccgattatgcgcgaagaaattattgagaactacttgggctacttagggatcaagatcgataaagaagccaatgacttcaaaggtgaggagaagatcatttcaacgcccgattccaaagtgattgcgatggtagttccgaccaacgaggagctgatgatcgccaaagacacgaaagaaatcattgagaaagggttggacgagcttaagatc

SEQ ID NO: 1322 - protein, 417 aa, synthetic construct
  REGION 1..417: note = variant of acetate kinase from Marinitoga sp.38H-ov
MHHHHHHGGSGMKVLVINSGSSSIKYQLLDMTNEKVLAKGLVERIGIDGSRIVHKVNGEGHVLEHEIKNHEIGLKLVLDLLTDEKYGVLKDLKEIDAVGHRVVHGGERFASSVKITDEVLKTIETLSFLAPLHNPANIMGIKSSMKVLPGVPQVAVFDTAFHQKMPEKAYLYAIPYEYYEKYKIRRYGFHGTSHRYVSKRAAEIMGKPYDQLKIITVHVGNGASVAAVKNGVSVDTSMGFTPLEGLVMGTRSGDIDPAIVEFLEKEEGLSAKEVVNILWKKSGVRGLTKGFSRDMRDIVRKAIEGDPVCRLALDVYYYRIAKYIGAYAAAMNGVDAIVFTAGVGENSPIMREEIIENYLGYLGIKIDKEANDFKGEEKIISTPDSKVIAMVVPTNEELMIAKDTKEIIEKGLDELKI

SEQ ID NO: 1323 - DNA, 1251 bp, synthetic construct
  misc_feature 1..1251: note = variant of acetate kinase from Marinitoga sp.38H-ov
  source 1..1251: mol_type = other DNA
atgcaccatcatcatcatcatggcggtagcggcatgaaagttctggtgattaattctggtagctcctccatcaaatatcagctcctcgatatgaccaacgaaaaggtattagcgaaaggcttggtcgaacgcattggcatcgacggttcgcgtatcgtgcataaagttaacggcgaagggcacgtgctggaacatgagattaaaaatcacgaaattggacttaaattggtcctggatcttcttacggacgaaaaatacggtgtgttgaaggatctcaaagaaatcgatgcagttgggcatcgcgtagtacatggcggcgagcgttttgccagtagcgtgaagattactgacgaagtcttaaagaccatcgagacgttgttgttcttagctccgttacacaatccagcgaacattatgggtatcaagagcagcatgaaagtgttaccgggtgtgcctcaagttgccgtctttgatacagcgttccaccagaagatgccggagaaagcctatttgtacgcaatcccctatgagtactacgagaaatataaaattcgccgctatgggtttcatggaacctcacatcgttatgtgagtaaacgtgctgcggaaattatgggcaaaccgtacgatcagctcaagatcattaccgttcacgtgggtaacggcgcatcagttgcggcggtgaagaatggcgtatctgttgacacttccatgggtttcacaccacttgaaggtcttgtcatgggcacgcgcagcggcgatattgatccggccatcgtggaatttcttgagaaagaagaaggattgtcggccaaagaagtcgtcaacatcctctggaagaaatctggtgtgcgcgggctcaccaaaggctttagtagggacatgcgtctgattgtgctgaaggctattgaaggtgatcctgtatgccgccttgcattagatgtgtattattatcgtatcgcgaaatatattggcgcatacgctgcggccatgaacggtgttgacgcgatcgtctttaccgcaggagttggcgaaaatagcccgattatgcgcgaagaaattattgagaactacttgggctacttagggatcaagatcgataaagaagccaatgacttcaaaggtgaggagaagatcatttcaacgcccgattccaaagtgattgcgatggtagttccgaccaacgaggagctgatgatcgccaaagacacgaaagaaatcattgagaaagggttggacgagcttaagatc

SEQ ID NO: 1324 - protein, 417 aa, synthetic construct
  REGION 1..417: note = variant of acetate kinase from Marinitoga sp.38H-ov
MHHHHHHGGSGMKVLVINSGSSSIKYQLLDMTNEKVLAKGLVERIGIDGSRIVHKVNGEGHVLEHEIKNHEIGLKLVLDLLTDEKYGVLKDLKEIDAVGHRVVHGGERFASSVKITDEVLKTIETLLFLAPLHNPANIMGIKSSMKVLPGVPQVAVFDTAFHQKMPEKAYLYAIPYEYYEKYKIRRYGFHGTSHRYVSKRAAEIMGKPYDQLKIITVHVGNGASVAAVKNGVSVDTSMGFTPLEGLVMGTRSGDIDPAIVEFLEKEEGLSAKEVVNILWKKSGVRGLTKGFSRDMRLIVLKAIEGDPVCRLALDVYYYRIAKYIGAYAAAMNGVDAIVFTAGVGENSPIMREEIIENYLGYLGIKIDKEANDFKGEEKIISTPDSKVIAMVVPTNEELMIAKDTKEIIEKGLDELKI

SEQ ID NO: 1325 - DNA, 1251 bp, synthetic construct
  misc_feature 1..1251: note = variant of acetate kinase from Marinitoga sp.38H-ov
  source 1..1251: mol_type = other DNA
atgcaccatcatcatcatcatggcggtagcggcatgaaagttctggtgattaattctggtagctcctccatcaaatatcagctcctcgatatgaccaacgaaaaggtattagcgaaaggcttggtcgaacgcattggcatcgacggttcgcgtatcgtgcataaagttaacggcgaagggcacgtgctggaacatgagattaaaaatcacgaaattggacttaaattggtcctggatcttcttacggacgaaaaatacggtgtgttgaaggatctcaaagaaatcgatgcagttgggcatcgcgtagtacatggcggcgagcgttttgccagtagcgtgaagattactgacgaagtcttaaagaccatcgagacgttgtcgttcttagctccgttacacaatccagcgaacattatgggtatcaagagcagcatgaaagtgttaccgggtgtgcctcaagttgccgtctttgatacagcgttccaccagaagatgccggagaaagcctatttgtacgcaatcccctatgagtactacgagaaatataaaattcgccgctatgggtttcatggaacctcacatcgttatgtgagtaaacgtgctgcggaaattatgggcaaaccgctggatcagctcaagatcattaccgttcacgtgggtaacggcgcatcagttgcggcggtgaagaatggcgtatctgttgacacttccatgggtttcacaccacttgaaggtcttgtcatgggcacgcgcagcggcgatattgatccggccatcgtggaatttcttgagaaagaagaaggattgtcggccaaagaagtcgtcaacatcctctggaagaaatctggtgtgtatgggctcaccaaaggcccgagtagggacatgcgtgacattgtgctgaaggctattgaaggtgatcctgtatgccgccttgcattagatgtgtattattatcgtatcgcgaaatatattggcgcatacgctgcggccatgaacggtgttgacgcgatcgtctttaccgcaggagttggcgaaaatagcccgattatgcgcgaagaaattattgagaactacttgggctacttagggatcaagatcgataaagaagccaatgacttcaaaggtgaggagaagatcatttcaacgcccgattccaaagtgattgcgatggtagttccgaccaacgaggagctcatgatcgccaaagacacgaaagaaatcattgagaaagggttggacgagcttaagatc

SEQ ID NO: 1326 - protein, 417 aa, synthetic construct
  REGION 1..417: note = variant of acetate kinase from Marinitoga sp.38H-ov
MHHHHHHGGSGMKVLVINSGSSSIKYQLLDMTNEKVLAKGLVERIGIDGSRIVHKVNGEGHVLEHEIKNHEIGLKLVLDLLTDEKYGVLKDLKEIDAVGHRVVHGGERFASSVKITDEVLKTIETLSFLAPLHNPANIMGIKSSMKVLPGVPQVAVFDTAFHQKMPEKAYLYAIPYEYYEKYKIRRYGFHGTSHRYVSKRAAEIMGKPLDQLKIITVHVGNGASVAAVKNGVSVDTSMGFTPLEGLVMGTRSGDIDPAIVEFLEKEEGLSAKEVVNILWKKSGVYGLTKGPSRDMRDIVLKAIEGDPVCRLALDVYYYRIAKYIGAYAAAMNGVDAIVFTAGVGENSPIMREEIIENYLGYLGIKIDKEANDFKGEEKIISTPDSKVIAMVVPTNEELMIAKDTKEIIEKGLDELKI

SEQ ID NO: 1327 - DNA, 1251 bp, synthetic construct
  misc_feature 1..1251: note = variant of acetate kinase from Marinitoga sp.38H-ov
  source 1..1251: mol_type = other DNA
atgcaccatcatcatcatcatggcggtagcggcatgaaagtgctgagcattaattctggtagctcctccatcaaatatcagctcctcgatatgaccaacgaaaaggtattagcgaaaggcttggtcgaacgcattggcatcgacggttcgcgtatcgtgcttaaagttaacggcgaagggcacgtgctggaacatgagattaaaaatcacgaaattggacttaaattggtcctggatcttcttacggacgaaaaatacggtgtgttgaaggatctcaaagaaatcgatgcagttgggcatcgcgtagtacatggcggcgagcgttttgccagtagcgtgaagattactgacgaagtcttaaagaccatcgagacgttgtcgttcttagctccgttacacaatccagcgaacattatgggtatcaagagcagcatgaaagtgttaccgggtgtgcctcaagttgccgtctttgatacagcgttccaccagaagatgccggagaaagcctatttgtacgcaatcccctatgagtactacgagaaatataaaattcgccgctatgggtttcatggaacctcacatcgttatgtgagtaaacgtgctgcggaaattatgggcaaaccgtacgatcagctcaagatcattaccgttcacgtgggtaacggcgcatcagttgcggcggtgaagaatggcgtatctgttgacacttccatgggtttcacaccacttgaaggtcttgtcatgggcacgcgcagcggcgatattgatccggccatcgtggaatttcttgagaaagaagaaggattgtcggccaaagaagtcgtcaacgcgctctggaagaaatctggtgtgtatgggctcaccaaaggctttagtagggacatgcgtgacattgtgctgaaggctattgaaggtgatcctgtatgccgccttgcattagatgtgtattattatcgtatcgcgaaatatattggcgcatacgctgcggccatgaacggtgttgacgcgatcgtctttaccgcaggagttggcgaaaatagcccgattatgcgcgaagaaattattgagaactacttgggctacttagggatcaagatcgataaagaagccaatgacttcaaaggtgaggagaagatcatttcaacgcccgattccaaagtgattgcgatggtagttccgaccaacgaggagctcatgatcgccaaagacacgaaagaaatcattgagaaagggttggacgagcttaagatc

SEQ ID NO: 1328 - protein, 417 aa, synthetic construct
  REGION 1..417: note = variant of acetate kinase from Marinitoga sp.38H-ov
MHHHHHHGGSGMKVLSINSGSSSIKYQLLDMTNEKVLAKGLVERIGIDGSRIVLKVNGEGHVLEHEIKNHEIGLKLVLDLLTDEKYGVLKDLKEIDAVGHRVVHGGERFASSVKITDEVLKTIETLSFLAPLHNPANIMGIKSSMKVLPGVPQVAVFDTAFHQKMPEKAYLYAIPYEYYEKYKIRRYGFHGTSHRYVSKRAAEIMGKPYDQLKIITVHVGNGASVAAVKNGVSVDTSMGFTPLEGLVMGTRSGDIDPAIVEFLEKEEGLSAKEVVNALWKKSGVYGLTKGFSRDMRDIVLKAIEGDPVCRLALDVYYYRIAKYIGAYAAAMNGVDAIVFTAGVGENSPIMREEIIENYLGYLGIKIDKEANDFKGEEKIISTPDSKVIAMVVPTNEELMIAKDTKEIIEKGLDELKI

SEQ ID NO: 1329 - DNA, 1251 bp, synthetic construct
  misc_feature 1..1251: note = variant of acetate kinase from Marinitoga sp.38H-ov
  source 1..1251: mol_type = other DNA
atgcaccatcatcatcatcatggcggtagcggcatgaaagttctggtgattaattctggtagctcctccatcaaatatcagctcctcgatatgaccaacgaaaaggtattagcgaaaggcttggtcgaacgcattggcatcgacggttcgcgtatcgtgcataaagttaacggcgaagggcacgtgctggaacatgagattaaaaatcacgaaattggacttaaattggtcctggatcttcttacggacgaaaaatacggtaacttgaaggatctcaaagaaatcgatgcagttgggcatcgcgtagtacatggcggcgagcgttttgccagtagcgtgaagattactgacgaagtcttaaagaccatcgagacgttgtcgttcttagctccgttacacaatccagcgaacattatgggtatcaagagcagcatgaaagtgttaccgggtgtgcctcaagttgccgtctttgatacagcgttccaccagaagatgccggagaaagcctatttgtacgcaatcccctatgagtactacgagaaatataaaattcgccgctatgggtttcatggaacctcacatcgttatgtgagtaaacgtgctgcggaaattatgggcaaaccgcgggatcagctcaagatcattaccgttcacgtgggtaacggcacatcagttgcggcggtgaagaatggcgtatctgttgacacttccatgggtttcacaccacttgaaggtcttgtcatgggcacgcgcagcggcgatattgatccggccatcgtggaatttcttgagaaagaagaaggattgtcggccaaagaagtcgtcaacatcctctggaagaaatctggtgtgtatgggctcaccaaaggctttagtagggacatgcgtgacattgtgctgaaggctattgaaggtgatcctgtatgccgccttgcattagatgtgtattattatcgtatcgcgaaatatattggcgcatacgctgcggccatgaacggtgttgacgcgatcgtctttaccgcaggagttggcgaaaatagcccgattatgcgcgaagaaattattgagaactacttgggctacttagggatcaagatcgataaagaagccaatgacttcaaaggtgaggagaagatcatttcaacgcccgattccaaagtgattgcgatggtagttccgaccaacgaggagctcatgatcgccaaagacacgaaagaaatcattgagaaagggttggacgagcttaagatc

SEQ ID NO: 1330 - protein, 417 aa, synthetic construct
  REGION 1..417: note = variant of acetate kinase from Marinitoga sp.38H-ov
MHHHHHHGGSGMKVLVINSGSSSIKYQLLDMTNEKVLAKGLVERIGIDGSRIVHKVNGEGHVLEHEIKNHEIGLKLVLDLLTDEKYGNLKDLKEIDAVGHRVVHGGERFASSVKITDEVLKTIETLSFLAPLHNPANIMGIKSSMKVLPGVPQVAVFDTAFHQKMPEKAYLYAIPYEYYEKYKIRRYGFHGTSHRYVSKRAAEIMGKPRDQLKIITVHVGNGTSVAAVKNGVSVDTSMGFTPLEGLVMGTRSGDIDPAIVEFLEKEEGLSAKEVVNILWKKSGVYGLTKGFSRDMRDIVLKAIEGDPVCRLALDVYYYRIAKYIGAYAAAMNGVDAIVFTAGVGENSPIMREEIIENYLGYLGIKIDKEANDFKGEEKIISTPDSKVIAMVVPTNEELMIAKDTKEIIEKGLDELKI

SEQ ID NO: 1331 - DNA, 1251 bp, synthetic construct
  misc_feature 1..1251: note = variant of acetate kinase from Marinitoga sp.38H-ov
  source 1..1251: mol_type = other DNA
atgcaccattatcatcatcatggcggtagcggcatgaaagttctggtgattaattctggtagctcctccatcaaatatcagctcctcgatatgaccaacgaaaaggtattagcgaaaggcttggtcgaacgcattggcatcgacggttcgcgtatcgtgcataaagttaacggcgaagggcacgtgctggaacatgagattaaaaatcacgaaattggacttaaattggtcctggatcttcttacggacgaaaaatacggtgtgttgaaggatctcaaagaaatcgatgcagttgggcatcgcgtagtacatggcggcgagcgttttgccagtagcgtgaagattactgacgaagtcttaaagaccatcgagacgttgtcgttcttagctccgttacacaatccagcgaacattatgggtatcaagagcagcatgaaagtgttaccgggtgtgcctcaagttgccgtctttgatacagcgttccaccagaagatgccggagaaagcctatttgtacgcaatcccctatgagtactacgagaaatataaaattcgccgctatgggtttcatggaacctcacatcgttatgtgagtaaacgtgctgcggaaattatgggcaaaccgtatgatcagctcaagatcattaccgttcacgtgggtaacggcgcatcagttgcggcggtgaagaatggcgtatctgttgacacttccatgggtttcacaccacttgaaggtcttgtcatgggcacgcgcagcggcgatattgatccggccatcgtggaatttcttgagaaagaagaaggattgtcggccaaagaagtcgtcaacattctctggaagaaatctggtgtgtatgggctcaccaaaggctttagtagggacatgcgtgacattgtgctgaaggctattgaaggtgatcctgtatgccgccttgcattagatgtgtattattatcgtatcgcgaaatatattggcgcatacgctgcggccatgaacggtgttgacgcgatcgtctttaccgcaggagttggcgaaaatagcccgattatgcgcgaagaaattattgagaactacttgggctacttagggatcaagatcgataaagaagccaatgacttcaaaggtgaggagaagatcatttcaacgcccgattccaaagtgattgcgatggtagttccgaccaacgaggagctcatgatcgccaaagacacgaaagaaatcattgagaaagggttggacgagcttaagatc

SEQ ID NO: 1332 - protein, 417 aa, synthetic construct
  REGION 1..417: note = variant of acetate kinase from Marinitoga sp.38H-ov
MHHYHHHGGSGMKVLVINSGSSSIKYQLLDMTNEKVLAKGLVERIGIDGSRIVHKVNGEGHVLEHEIKNHEIGLKLVLDLLTDEKYGVLKDLKEIDAVGHRVVHGGERFASSVKITDEVLKTIETLSFLAPLHNPANIMGIKSSMKVLPGVPQVAVFDTAFHQKMPEKAYLYAIPYEYYEKYKIRRYGFHGTSHRYVSKRAAEIMGKPYDQLKIITVHVGNGASVAAVKNGVSVDTSMGFTPLEGLVMGTRSGDIDPAIVEFLEKEEGLSAKEVVNILWKKSGVYGLTKGFSRDMRDIVLKAIEGDPVCRLALDVYYYRIAKYIGAYAAAMNGVDAIVFTAGVGENSPIMREEIIENYLGYLGIKIDKEANDFKGEEKIISTPDSKVIAMVVPTNEELMIAKDTKEIIEKGLDELKI

SEQ ID NO: 1333 - DNA, 1251 bp, synthetic construct
  misc_feature 1..1251: note = variant of acetate kinase from Marinitoga sp.38H-ov
  source 1..1251: mol_type = other DNA
atgcaccatcatcatcatcatggcggtagcggcatgaaagtgctggtgattaattctggtagctcctccatcaaatatcagctcctcgatatgcgcaacgaaaaggtattagcgaaaggcttggtcgaacgcattggcatcgacggttcgcgtatcgtgcataaagttaacggcgaagggcacgtgctggaacatgagattaaaaatcacgaaattggacttaaattggtcctggatcttcttacggacgaaaaatacggtccgttgaaggatctcaaagaaatcgatgcagttgggcatcgcgtagtacatggcggcgagcgttttgccagtagcgtgaagattactgacgaagtcttaaagaccatcgagacgttgtcgttcttagctccgttacacaatccagcgaacattatgggtatcaagagcagcatgaaagtgttaccgggtgtgcctcaagttgccgtctttgatacagcgttccaccagaagatgccggagaaagcctatttgtacgcaatcccctatgagtactacgagaaatataaaattcgccgctatgggtttcatggaacctcacatcgttatgtgagtaaacgtgctgcggaaattatgggcaaaccgtatgatcagctcaagatcattaccgttcacgtgggtaacggcgcatcagttgcggcggtgaagaatggcgtatctgttgacacttccatgggtttcacaccacttgaaggtcttgtcatgggcacgcgcagcggcgatattgatccggccatcgtggaatttcttgagaaagaagaaggattgtcggccaaagaagtcgtcaacgcgctctggaagaaatctggtgtgtatgggctcaccaaaggctttagtagggacatgcgtgacattgtgctgaaggctattgaaggtgatcctgtatgccgccttgcattagatgtgtattattatcgtatcgcgaaatatattggcgcatacgctgcggccatgaacggtgttgacgcgatcgtctttaccgcaggagttggcgaaaatagcccgattatgcgcgaagaaattattgagaactacttgggctacttagggatcaagatcgataaagaagccaatgacttcaaaggtgaggagaagatcatttcaacgcccgattccaaagtgattgcgatggtagttccgaccaacgaggagctcatgatcgccaaagacacgaaagaaatcattgagaaagggttggacgagcttaagatc

SEQ ID NO: 1334 - protein, 417 aa, synthetic construct
  REGION 1..417: note = variant of acetate kinase from Marinitoga sp.38H-ov
MHHHHHHGGSGMKVLVINSGSSSIKYQLLDMRNEKVLAKGLVERIGIDGSRIVHKVNGEGHVLEHEIKNHEIGLKLVLDLLTDEKYGPLKDLKEIDAVGHRVVHGGERFASSVKITDEVLKTIETLSFLAPLHNPANIMGIKSSMKVLPGVPQVAVFDTAFHQKMPEKAYLYAIPYEYYEKYKIRRYGFHGTSHRYVSKRAAEIMGKPYDQLKIITVHVGNGASVAAVKNGVSVDTSMGFTPLEGLVMGTRSGDIDPAIVEFLEKEEGLSAKEVVNALWKKSGVYGLTKGFSRDMRDIVLKAIEGDPVCRLALDVYYYRIAKYIGAYAAAMNGVDAIVFTAGVGENSPIMREEIIENYLGYLGIKIDKEANDFKGEEKIISTPDSKVIAMVVPTNEELMIAKDTKEIIEKGLDELKI

SEQ ID NO: 1335 - DNA, 1251 bp, synthetic construct
  misc_feature 1..1251: note = variant of acetate kinase from Marinitoga sp.38H-ov
  source 1..1251: mol_type = other DNA
atgcaccatcatcatcatcatggcggtagcggcatgaaagttctggtgattaattctggtagctcctccatcaaatatcagctcctcgatatgaccaacgaaaaggtattagcgaaaggcttggtcgaacgcattggcatcgacggttcgcgtatcgtgcataaagttaacggcgaagggcacgtgctggaacatgagattaaaaatcacgaaattggacttaaattggtcctggatcttcttacggacgaaaaatacggtgtgttgaaggatctcaaagaaatcgatgcagttgggcatcgcgtagtacatggcggcgagcgttttgccagtagcgtgaagattactgacgaagtcttaaagaccatcgagacgttgttgttcttagctccgttacacaatccagcgaacattatgggtatcaagagcagcatgaaagtgttaccgggtgtgcctcaagttgccgtctttgatacagcgttccaccagaagatgccggagaaagcctatttgtacgcaatcccctatgagtactacgagaaatataaaattcgccgctatgggtttcatggaacctcacatcgttatgtgagtaaacgtgctgcggaaattatgggcaaaccgtacgatcagctcaagatcattaccgttcacgtgggtaacggcgcatcagttgcggcggtgaagaatggcgtatctgttgacacttccatgggtttcacaccacttgaaggtcttgtcatgggcacgcgcagcggcgatattgatccggccatcgtggaatttcttgagaaagaagaaggattgtcggccaaagaagtcgtcaacatcctctggaagaaatctggtgtgtatgggctcaccaaaggctttagtagggacatgcgtctgattgtgctgaaggctattgaaggtgatcctgtatgccgccttgcattagatgtgtattattatcgtatcgcgaaatatattggcgcatacgctgcggccatgaacggtgttgacgcgatcgtctttaccgcaggagttggcgaaaatagcccgattatgcgcgaagaaattattgagaactacttgggctacttagggatcaagatcgataaagaagccaatgacttcaaaggtgaggagaagatcatttcaacgcccgattccaaagtgattgcgatggtagttccgaccaacgaggagtatatgatcgccaaagacacgaaagaaatcattgagaaagggttggacgagcttaagatc

SEQ ID NO: 1336 - protein, 417 aa, synthetic construct
  REGION 1..417: note = variant of acetate kinase from Marinitoga sp.38H-ov
MHHHHHHGGSGMKVLVINSGSSSIKYQLLDMTNEKVLAKGLVERIGIDGSRIVHKVNGEGHVLEHEIKNHEIGLKLVLDLLTDEKYGVLKDLKEIDAVGHRVVHGGERFASSVKITDEVLKTIETLLFLAPLHNPANIMGIKSSMKVLPGVPQVAVFDTAFHQKMPEKAYLYAIPYEYYEKYKIRRYGFHGTSHRYVSKRAAEIMGKPYDQLKIITVHVGNGASVAAVKNGVSVDTSMGFTPLEGLVMGTRSGDIDPAIVEFLEKEEGLSAKEVVNILWKKSGVYGLTKGFSRDMRLIVLKAIEGDPVCRLALDVYYYRIAKYIGAYAAAMNGVDAIVFTAGVGENSPIMREEIIENYLGYLGIKIDKEANDFKGEEKIISTPDSKVIAMVVPTNEEYMIAKDTKEIIEKGLDELKI

SEQ ID NO: 1337 - DNA, 1251 bp, synthetic construct
  misc_feature 1..1251: note = variant of acetate kinase from Marinitoga sp.38H-ov
  source 1..1251: mol_type = other DNA
atgcaccatcatcatcatcatggcggtagcggcatgaaagtgctggtgattaattctggtagctcctccatcaaatatcagctcctcgatatgcgcaacgaaaaggtattagcgaaaggcttggtcgaacgcattggcatcgacggttcgcgtatcgtgcataaagttaacggcgaagggcacgtgctggaacatgagattaaaaatcacgaaattggacttaaattggtcctggatcttcttacggacgaaaaatacggtgtgttgaaggatctcaaagaaatcgatgcagttgggcatcgcgtagtacatggcggcgagcgttttgccagtagcgtgaagattactgacgaagtcttaaagaccatcgagacgttgtcgttcttagctccgttacacaatccagcgaacattatgggtatcaagagcagcatgaaagtgttaccgggtgtgcctcaagttgccgtctttgatacagcgttccaccagaagatgccggagaaagcctatttgtacgcaatcccctatgagtactacgagaaatataaaattcgccgctatgggtttcatggaacctcacatcgttatgtgagtaaacgtgctgcggaaattatgggcaaaccgcgggatcagctcaagatcattaccgttcacgtgggtaacggcgcatcagttgcggcggtgaagaatggcgtatctgttgacacttccatgggtttcacaccacttgaaggtcttgtcatgggcacgcgcagcggcgatattgatccggccatcgtggaatttcttgagaaagaagaaggattgtcggccaaagaagtcgtcaacattctctggaagaaatctggtgtgtatgggctcaccaaaggcccgagtagggacatgcgtgacattgtgctgaaggctattgaaggtgatcctgtatgccgccttgcattagatgtgtattattatcgtatcgcgaaatatattggcgcatacgctgcggccatgaacggtgttgacgcgatcgtctttaccgcaggagttggcgaaaatagcccgattatgcgcgaagaaattattgagaactacttgggctacttagggatcaagatcgataaagaagccaatgacttcaaaggtgaggagaagatcatttcaacgcccgattccaaagtgattgcgatggtagttccgaccaacgaggagctcatgatcgccaaagacacgaaagaaatcattgagaaagggttggacgagcttaagatc

SEQ ID NO: 1338 - protein, 417 aa, synthetic construct
  REGION 1..417: note = variant of acetate kinase from Marinitoga sp.38H-ov
MHHHHHHGGSGMKVLVINSGSSSIKYQLLDMRNEKVLAKGLVERIGIDGSRIVHKVNGEGHVLEHEIKNHEIGLKLVLDLLTDEKYGVLKDLKEIDAVGHRVVHGGERFASSVKITDEVLKTIETLSFLAPLHNPANIMGIKSSMKVLPGVPQVAVFDTAFHQKMPEKAYLYAIPYEYYEKYKIRRYGFHGTSHRYVSKRAAEIMGKPRDQLKIITVHVGNGASVAAVKNGVSVDTSMGFTPLEGLVMGTRSGDIDPAIVEFLEKEEGLSAKEVVNILWKKSGVYGLTKGPSRDMRDIVLKAIEGDPVCRLALDVYYYRIAKYIGAYAAAMNGVDAIVFTAGVGENSPIMREEIIENYLGYLGIKIDKEANDFKGEEKIISTPDSKVIAMVVPTNEELMIAKDTKEIIEKGLDELKI

SEQ ID NO: 1339 - DNA, 1251 bp, synthetic construct
  misc_feature 1..1251: note = variant of acetate kinase from Marinitoga sp.38H-ov
  source 1..1251: mol_type = other DNA
atgcaccatcatcatcatcatggcggtagcggcatgaaagtgctggtgattaattctggtagctcctccatcaaatatcagctcctcgatatgcgcaacgaaaaggtattagcgaaaggcttggtcgaacgcattggcatcgacggttcgcgtatcgtgcataaagttaacggcgaagggcacgtgctggaacatgagattaaaaatcacgaaattggacttaaattggtcctggatcttcttacggacgaaaaatacggtccgttgaaggatctcaaagaaatcgatgcagttgggcatcgcgtagtacatggcggcgagcgttttgccagtagcgtgaagattactgacgaagtcttaaagaccatcgagacgttgtcgttcttagctccgttacacaatccagcgaacattatgggtatcaagagcagcatgaaagtgttaccgggtgtgcctcaagttgccgtctttgatacagcgttccaccagaagatgccggagaaagcctatttgtacgcaatcccctatgagtactacgagaaatataaaattcgccgctatgggtttcatggaacctcacatcgttatgtgagtaaacgtgctgcggaaattatgggcaaaccgtatgatcagctcaagatcattaccgttcacgtgggtaacggcgcatcagttgcggcggtgaagaatggcgtatctgttgacacttccatgggtttcacaccacttgaaggtcttgtcatgggcacgcgcagcggcgatattgatccggccatcgtggaatttcttgagaaagaagaaggattgtcggccaaagaagtcgtcaacattctctggaagaaatctggtgtgtatgggctcaccaaaggctttagtagggacatgcgtgacattgtgctgaaggctattgaaggtgatcctgtatgccgccttgcattagatgtgtattattatcgtatcgcgaaatatattggcgcatacgctgcggccatgaacggtgttgacgcgatcgtctttaccgcaggagttggcgaaaatagcccgattatgcgcgaagaaattattgagaactacttgggctacttagggatcaagatcgataaagaagccaatgacttcaaaggtgaggagaagatcatttcaacgcccgattccaaagtgattgcgatggtagttccgaccaacgaggagctcatgatcgccaaagacacgaaagaaatcattgagaaagggttggacgagcttaagatc

SEQ ID NO: 1340 - protein, 417 aa, synthetic construct
  REGION 1..417: note = variant of acetate kinase from Marinitoga sp.38H-ov
MHHHHHHGGSGMKVLVINSGSSSIKYQLLDMRNEKVLAKGLVERIGIDGSRIVHKVNGEGHVLEHEIKNHEIGLKLVLDLLTDEKYGPLKDLKEIDAVGHRVVHGGERFASSVKITDEVLKTIETLSFLAPLHNPANIMGIKSSMKVLPGVPQVAVFDTAFHQKMPEKAYLYAIPYEYYEKYKIRRYGFHGTSHRYVSKRAAEIMGKPYDQLKIITVHVGNGASVAAVKNGVSVDTSMGFTPLEGLVMGTRSGDIDPAIVEFLEKEEGLSAKEVVNILWKKSGVYGLTKGFSRDMRDIVLKAIEGDPVCRLALDVYYYRIAKYIGAYAAAMNGVDAIVFTAGVGENSPIMREEIIENYLGYLGIKIDKEANDFKGEEKIISTPDSKVIAMVVPTNEELMIAKDTKEIIEKGLDELKI

SEQ ID NO: 1341 - DNA, 1251 bp, synthetic construct
  misc_feature 1..1251: note = variant of acetate kinase from Marinitoga sp.38H-ov
  source 1..1251: mol_type = other DNA
atgcaccatcatcatcatcatggcggtagcggcatgaaagttctggtgattaattcgggtagccgctccatcaaatatcagctcctcgatatgaccaacgaaaaggtattattaaaaggcttggtcgaacgcattggcatcgacggttcgcgtatcgtgcataaagttaacggcgaagggcacgtgctggaacatgagattaaaaatcacgaaattggacttaaattggtcctggatcttcttacggacgaaaaatacggtgtgttgaaggatctcaaagaaatcgatgcagttgggcatcgcgtagtacatggcggcgagcgttttgccagtagcgtgaagattactgacgaagtcttaaagaccatcgagacgttgttgttcttagctccgttacacaatccagcgaacattatgggtatcaagagcagcatgaaagtgttaccgggtgtgcctcaagttgccgtctttgatacagcgttccaccagaagatgccggagaaagcctatttgtacgcaatcccctatgagtactacgagaaatataaaattcgccgctatgggtttcatggaacctcacatcgttatgtgagtaaacgtgctgcggaaattatgggcaaaccgtacgatcagctcaagatcattaccgttcacgtgggtaacggcgcatcagttgcggcggtgaagaatggcgtatctgttgacacttccatgggtttcacaccacttgaaggtcttgtcatgggcacgcgcagcggcgatattgatccggccatcgtggaatttcttgagaaagaagaaggattgtcggccaaagaagtcgtcaacatcctctggaagaaatctggtgtgtatgggctcaccaaaggctttagtagggacatgcgtgatattgtgcggaaggctattgaaggtgatcctgtatgccgccttgcattagatgtgtattattatcgtatcgcgaaatatattggcgcatacgctgcggccatgaacggtgttgacgcgatcgtctttaccgcaggagttggcgaaaatagcccgattatgcgcgaagaaattattgagaactacttgggctacttagggatcaagatcgataaagaagccaatgacttcaaaggtgaggagaagatcatttcaacgcccgattccaaagtgattgcgatggtagttccgaccaacgaggagctgatgatcgccaaagacacgaaagaaatcattgagaaagggttggacgagcttaagatc

SEQ ID NO: 1342 - protein, 417 aa, synthetic construct
  REGION 1..417: note = variant of acetate kinase from Marinitoga sp.38H-ov
MHHHHHHGGSGMKVLVINSGSRSIKYQLLDMTNEKVLLKGLVERIGIDGSRIVHKVNGEGHVLEHEIKNHEIGLKLVLDLLTDEKYGVLKDLKEIDAVGHRVVHGGERFASSVKITDEVLKTIETLLFLAPLHNPANIMGIKSSMKVLPGVPQVAVFDTAFHQKMPEKAYLYAIPYEYYEKYKIRRYGFHGTSHRYVSKRAAEIMGKPYDQLKIITVHVGNGASVAAVKNGVSVDTSMGFTPLEGLVMGTRSGDIDPAIVEFLEKEEGLSAKEVVNILWKKSGVYGLTKGFSRDMRDIVRKAIEGDPVCRLALDVYYYRIAKYIGAYAAAMNGVDAIVFTAGVGENSPIMREEIIENYLGYLGIKIDKEANDFKGEEKIISTPDSKVIAMVVPTNEELMIAKDTKEIIEKGLDELKI

SEQ ID NO: 1343 - DNA, 1251 bp, synthetic construct
  misc_feature 1..1251: note = variant of acetate kinase from Marinitoga sp.38H-ov
  source 1..1251: mol_type = other DNA
atgcaccatcatcatcatcatggcggtagcggcatgaaagttctggtgattaattctggtagctcctccatcaaatatcagctcctcgatatgaccaacgaaaaggtattatttaaaggcttggtcgaacgcattggcatcgacggttcgcgtatcgtgcataaagttaacggcgaagggcacgtgctggaacatgagattaaaaatcacgaaattggacttaaattggtcctggatcttcttacggacgaaaaatacggtgtgttgaaggatctcaaagaaatcgatgcagttgggcatcgcgtagtacatggcggcgagcgttttgccagtagcgtgaagattactgacgaagtcttaaagaccatcgagacgttgttgttcttagctccgttacacaatccagcgaacattatgggtatcaagagcagcatgaaagtgttaccgggtgtgcctcaagttgccgtctttgatacagcgttccaccagaagatgccggagaaagcctatttgtacgcaatcccctatgagtactacgagaaatataaaattcgccgctatgggtttcatggaacctcacatcgttatgtgagtaaacgtgctgcggaaattatgggcaaaccgtacgatcagctcaagatcattaccgttcacgtgggtaacggcgcatcagttgcggcggtgaagaatggcgtatctgttgacacttccatgggtttcacaccacttgaaggtcttgtcatgggcacgcgcagcggcgatattgatccggccatcgtggaatttcttgagaaagaagaaggattgtcggccaaagaagtcgtcaacatcctctggaagaaatctggtgtgtatgggctcaccaaaggctttagtagggacatgcgtctgattgtgctgaaggctattgaaggtgatcctgtatgccgccttgcattagatgtgtattattatcgtatcgcgaaatatattggcgcatacgctgcggccatgaacggtgttgacgcgatcgtctttaccgcaggagttggcgaaaatagcccgattatgcgcgaagaaattattgagaactacttgggctacttagggatcaagatcgataaagaagccaatgacttcaaaggtgaggagaagatcatttcaacgcccgattccaaagtgattgcgatggtagttccgaccaacgaggagctgatgatcgccaaagacacgaaagaaatcattgagaaagggttggacgagcttaagatc

SEQ ID NO: 1344 - protein, 417 aa, synthetic construct
  REGION 1..417: note = variant of acetate kinase from Marinitoga sp.38H-ov
MHHHHHHGGSGMKVLVINSGSSSIKYQLLDMTNEKVLFKGLVERIGIDGSRIVHKVNGEGHVLEHEIKNHEIGLKLVLDLLTDEKYGVLKDLKEIDAVGHRVVHGGERFASSVKITDEVLKTIETLLFLAPLHNPANIMGIKSSMKVLPGVPQVAVFDTAFHQKMPEKAYLYAIPYEYYEKYKIRRYGFHGTSHRYVSKRAAEIMGKPYDQLKIITVHVGNGASVAAVKNGVSVDTSMGFTPLEGLVMGTRSGDIDPAIVEFLEKEEGLSAKEVVNILWKKSGVYGLTKGFSRDMRLIVLKAIEGDPVCRLALDVYYYRIAKYIGAYAAAMNGVDAIVFTAGVGENSPIMREEIIENYLGYLGIKIDKEANDFKGEEKIISTPDSKVIAMVVPTNEELMIAKDTKEIIEKGLDELKI

SEQ ID NO: 1345 - DNA, 1251 bp, synthetic construct
  misc_feature 1..1251: note = variant of acetate kinase from Marinitoga sp.38H-ov
  source 1..1251: mol_type = other DNA
atgcaccatcatcatcatcatggcggtagcggcatgaaagttctggtgattaattctggtagctcctccatcaaatatcagctcctcgatatgaccaacgaaaaggtattagcgaaaggcttggtcgaacgcattggcatcgacggttcgcgtatcgtgcataaagttaacggcgaagggcacgtgctggaacatgagattaaaaatcacgaaattggacttaaattggtcctggatcttcttacggacgaaaaatacggtgtgttgaaggatctcaaagaaatcgatgcagttgggcatcgcgtagtacatggcggcgagcgttttgccagtagcgtgaagattactgacgaagtcttaaagaccatcgagacgttgtcgttcttagctccgttacacaatccagcgaacattatgggtatcaagagcagcatgaaagtgttaccgggtgtgcctcaagttgccgtctttgatacagcgttccaccagaagatgccggagaaagcctatttgtacgcaatcccctatgagtactacgagaaatataaaattcgccgctatgggtttcatggaacctcacatcgttatgtgagtaaacgtgctgcggaaattatgggcaaaccgtacgatcagctcaagatcattaccgttcacgtgggtaacggcgcatcagttgcggcggtgaagaatggcgtatctgttgacacttccatgggtttcacaccacttgaaggtcttgtcatgggcacgcgcagcggcgatattgatccggccatcgtggaatttcttgagaaagaagaaggattgtcggccaaagaagtcgtcaacatcctctggaagaaatctggtgtgcgcgggctcaccaaaggctttagtagggacatgcgtctgattgtgctgaaggctattgaaggtgatcctgtatgccgccttgcattagatgtgtattattatcgtatcgcgaaatatattggcgcatacgctgcggccatgaacggtgttgacgcgatcgtctttaccgcaggagttggcgaaaatagcccgattatgcgcgaagaaattattgagaactacttgggctacttagggatcaagatcgataaagaagccaatgacttcaaaggtgaggagaagatcatttcaacgcccgattccaaagtgattgcgatggtagttccgaccaacgaggagctgatgatcgccaaagacacgaaagaaatcattgagaaagggttggacgagcttaagatc

SEQ ID NO: 1346 - protein, 417 aa, synthetic construct
  REGION 1..417: note = variant of acetate kinase from Marinitoga sp.38H-ov
MHHHHHHGGSGMKVLVINSGSSSIKYQLLDMTNEKVLAKGLVERIGIDGSRIVHKVNGEGHVLEHEIKNHEIGLKLVLDLLTDEKYGVLKDLKEIDAVGHRVVHGGERFASSVKITDEVLKTIETLSFLAPLHNPANIMGIKSSMKVLPGVPQVAVFDTAFHQKMPEKAYLYAIPYEYYEKYKIRRYGFHGTSHRYVSKRAAEIMGKPYDQLKIITVHVGNGASVAAVKNGVSVDTSMGFTPLEGLVMGTRSGDIDPAIVEFLEKEEGLSAKEVVNILWKKSGVRGLTKGFSRDMRLIVLKAIEGDPVCRLALDVYYYRIAKYIGAYAAAMNGVDAIVFTAGVGENSPIMREEIIENYLGYLGIKIDKEANDFKGEEKIISTPDSKVIAMVVPTNEELMIAKDTKEIIEKGLDELKI

SEQ ID NO: 1347 - DNA, 1251 bp, synthetic construct
  misc_feature 1..1251: note = variant of acetate kinase from Marinitoga sp.38H-ov
  source 1..1251: mol_type = other DNA
atgcaccatcatcatcatcatggcggtagcggcatgaaagttctggtgattaattctggtagctcctccatcaaatatcagctcctcgatatgcgcaacgaaaaggtattagcgaaaggcttggtcgaacgcattggcatcgacggttcgcgtatcgtgcttaaagttaacggcgaagggcacgtgctggaacatgagattaaaaatcacgaaattggacttaaattggtcctggatcttcttacggacgaaaaatacggtccgttgaaggatctcaaagaaatcgatgcagttgggcatcgcgtagtacatggcggcgagcgttttgccagtagcgtgaagattactgacgaagtcttaaagaccatcgagacgttgtcgttcttagctccgttacacaatccagcgaacattatgggtatcaagagcagcatgaaagtgttaccgggtgtgcctcaagttgccgtctttgatacagcgttccaccagaaggcgccggagaaagcctatttgtacgcaatcccctatgagtactacgagaaatataaaattcgccgctatgggtttcatggaacctcacatcgttatgtgagtaaacgtgctgcggaaattatgggcaaaccgctggatcagctcaagatcattaccgttcacgtgggtaacggcgcatcagttgcggcggtgaagaatggcgtatctgttgacacttccatgggtttcacaccacttgaaggtcttgtcatgggcacgcgcagcggcgatattgatccggccatcgtggaatttcttgagaaagaagaaggattgtcggccaaagaagtcgtcaacgcgctctggaagaaatctggtgtgtatgggctcaccaaaggctttagtagggacatgcgtgacattgtgctgaaggctattgaaggtgatcctgtatgccgccttgcattagatgtgtattattatcgtatcgcgaaatatattggcgcatacgctgcggccatgaacggtgttgacgcgatcgtctttaccgcaggagttggcgaaaatagcccgattatgcgcgaagaaattattgagaactacttgggctacttagggatcaagatcgataaagaagccaatgacttcaaaggtgaggagaagatcatttcaacgcccgattccaaagtgattgcgatggtagttccgaccaacgaggagctcatgatcgccaaagacacgaaagaaatcattgagaaagggttggacgagcttaagatc

SEQ ID NO: 1348 - protein, 417 aa, synthetic construct
  REGION 1..417: note = variant of acetate kinase from Marinitoga sp.38H-ov
MHHHHHHGGSGMKVLVINSGSSSIKYQLLDMRNEKVLAKGLVERIGIDGSRIVLKVNGEGHVLEHEIKNHEIGLKLVLDLLTDEKYGPLKDLKEIDAVGHRVVHGGERFASSVKITDEVLKTIETLSFLAPLHNPANIMGIKSSMKVLPGVPQVAVFDTAFHQKAPEKAYLYAIPYEYYEKYKIRRYGFHGTSHRYVSKRAAEIMGKPLDQLKIITVHVGNGASVAAVKNGVSVDTSMGFTPLEGLVMGTRSGDIDPAIVEFLEKEEGLSAKEVVNALWKKSGVYGLTKGFSRDMRDIVLKAIEGDPVCRLALDVYYYRIAKYIGAYAAAMNGVDAIVFTAGVGENSPIMREEIIENYLGYLGIKIDKEANDFKGEEKIISTPDSKVIAMVVPTNEELMIAKDTKEIIEKGLDELKI

SEQ ID NO: 1349 - DNA, 1251 bp, synthetic construct
  misc_feature 1..1251: note = variant of acetate kinase from Marinitoga sp.38H-ov
  source 1..1251: mol_type = other DNA
atgcaccatcatcatcatcatggcggtagcggcatgaaagttctggtgattaattctggtagctcctccatcaaatatcagctcctcgatatgcgcaacgaaaaggtattagcgaaaggcttggtcgaacgcattggcatcgacggttcgcgtatcgtgcttaaagttaacggcgaagggcacgtgctggaacatgagattaaaaatcacgaaattggacttaaattggtcctggatcttcttacggacgaaaaatacggtccgttgaaggatctcaaagaaatcgatgcagttgggcatcgcgtagtacatggcggcgagcgttttgccagtagcgtgaagattactgacgaagtcttaaagaccatcgagacgttgtcgttcttagctccgttacacaatccagcgaacattatgggtatcaagagcagcatgaaagtgttaccgggtgtgcctcaagttgccgtctttgatacagcgttccaccagaagatgccggagaaagcctatttgtacgcaatcccctatgagtactacgagaaatataaaattcgccgctatgggtttcatggaacctcacatcgttatgtgagtaaacgtgctgcggaaattatgggcaaaccgctggatcagctcaagatcattaccgttcacgtgggtaacggcgcatcagttgcggcggtgaagaatggcgtatctgttgacacttccatgggtttcacaccacttgaaggtcttgtcatgggcacgcgcagcggcgatattgatccggccatcgtggaatttcttgagaaagaagaaggattgtcggccaaagaagtcgtcaacgcgctctggaagaaatctggtgtgtatgggctcaccaaaggctttagtagggacatgcgtgacattgtgctgaaggctattgaaggtgatcctgtatgccgccttgcattagatgtgtattattatcgtatcgcgaaatatattggcgcatacgctgcggccatgaacggtgttgacgcgatcgtctttaccgcaggagttggcaataatagcccgattatgcgcgaagaaattattgagaactacttgggctacttagggatcaagatcgataaagaagccaatgacttcaaaggtgaggagaagatcatttcaacgcccgattccaaagtgattgcgatggtagttccgaccaacgaggagctcatgatcgccaaagacacgaaagaaatcattgagaaagggttggacgagcttaagatc

SEQ ID NO: 1350 - protein, 417 aa, synthetic construct
  REGION 1..417: note = variant of acetate kinase from Marinitoga sp.38H-ov
MHHHHHHGGSGMKVLVINSGSSSIKYQLLDMRNEKVLAKGLVERIGIDGSRIVLKVNGEGHVLEHEIKNHEIGLKLVLDLLTDEKYGPLKDLKEIDAVGHRVVHGGERFASSVKITDEVLKTIETLSFLAPLHNPANIMGIKSSMKVLPGVPQVAVFDTAFHQKMPEKAYLYAIPYEYYEKYKIRRYGFHGTSHRYVSKRAAEIMGKPLDQLKIITVHVGNGASVAAVKNGVSVDTSMGFTPLEGLVMGTRSGDIDPAIVEFLEKEEGLSAKEVVNALWKKSGVYGLTKGFSRDMRDIVLKAIEGDPVCRLALDVYYYRIAKYIGAYAAAMNGVDAIVFTAGVGNNSPIMREEIIENYLGYLGIKIDKEANDFKGEEKIISTPDSKVIAMVVPTNEELMIAKDTKEIIEKGLDELKI

SEQ ID NO: 1351 - DNA, 1251 bp, synthetic construct
  misc_feature 1..1251: note = variant of acetate kinase from Marinitoga sp.38H-ov
  source 1..1251: mol_type = other DNA
atgcaccatcatcatcatcatggcggtagcggcatgaaagttctggtgattaattctggtagctcctccatcaaatatcagctcctcgatatgcgcaacgaaaaggtattagcgaaaggcttggtcgaacgcattggcatcgacggttcgcgtatcgtgcttaaagttaacggcgaagggcacgtgctggaacatgagattaaaaatcacgaaattggacttaaattggtcctggatcttcttacggacgaaaaatacggtccgttgaaggatctcaaagaaatcgatgcagttgggcatcgcgtagtacatggcggcgagcgttttgccagtagcgtgaagattactgacgaagtcttaaagaccatcgagacgttgtcgttcttagctccgttacacaatccagcgaacattatgggtatcaagagcagcatgaaagtgttaccgggtgtgcctcaagttgccgtctttgatacagcgttccaccggaagatgccggagaaagcctatttgtacgcaatcccctatgagtactacgagaaatataaaattcgccgctatgggtttcatggaacctcacatcgttatgtgagtaaacgtgctgcggaaattatgggcaaaccgctggatcagctcaagatcattaccgttcacgtgggtaacggcgcatcagttgcggcggtgaagaatggcgtatctgttgacacttccatgggtttcacaccacttgaaggtcttgtcatgggcacgcgcagcggcgatattgatccggccatcgtggaatttcttgagaaagaagaaggattgtcggccaaagaagtcgtcaacgcgctctggaagaaatctggtgtgtatgggctcaccaaaggctttagtagggacatgcgtgacattgtgctgaaggctattgaaggtgatcctgtatgccgccttgcattagatgtgtattattatcgtatcgcgaaatatattggcgcatacgctgcggccatgaacggtgttgacgcgatcgtctttaccgcaggagttggcgaaaatagcccgattatgcgcgaagaaattattgagaactacttgggctacttagggatcaagatcgataaagaagccaatgacttcaaaggtgaggagaagatcatttcaacgcccgattccaaagtgattgcgatggtagttccgaccaacgaggagctcatgatcgccaaagacacgaaagaaatcattgagaaagggttggacgagcttaagatc

SEQ ID NO: 1352 - protein, 417 aa, synthetic construct
  REGION 1..417: note = variant of acetate kinase from Marinitoga sp.38H-ov
MHHHHHHGGSGMKVLVINSGSSSIKYQLLDMRNEKVLAKGLVERIGIDGSRIVLKVNGEGHVLEHEIKNHEIGLKLVLDLLTDEKYGPLKDLKEIDAVGHRVVHGGERFASSVKITDEVLKTIETLSFLAPLHNPANIMGIKSSMKVLPGVPQVAVFDTAFHRKMPEKAYLYAIPYEYYEKYKIRRYGFHGTSHRYVSKRAAEIMGKPLDQLKIITVHVGNGASVAAVKNGVSVDTSMGFTPLEGLVMGTRSGDIDPAIVEFLEKEEGLSAKEVVNALWKKSGVYGLTKGFSRDMRDIVLKAIEGDPVCRLALDVYYYRIAKYIGAYAAAMNGVDAIVFTAGVGENSPIMREEIIENYLGYLGIKIDKEANDFKGEEKIISTPDSKVIAMVVPTNEELMIAKDTKEIIEKGLDELKI

SEQ ID NO: 1353 - DNA, 1251 bp, synthetic construct
  misc_feature 1..1251: note = variant of acetate kinase from Marinitoga sp.38H-ov
  source 1..1251: mol_type = other DNA
atgcaccatcatcatcatcatggcggtagcggcatgaaagttctggtgattaattctggtagctcctccatcaaatatcagctcctcgatatgcgcaacgaaaaggtattagcgaaaggcttggtcgaacgcattggcatcgacggttcgcgtatcgtgcttaaagttaacggcgaagggcacgtgctggaacatgagattaaaaatcacgaaattggacttaaattggtcctggatcttcttacggacgaaaaatacggtccgttgaaggatctcaaagaaatcgatgcagttgggcatcgcgtagtacatggcggcgagcgttttgccagtagcgtgaagattactgacgaagtcttaaagaccatcgagacgttgtcgttcttagctccgttacacaatccagcgaacattatgggtatcaagagcagcatgaaagtgttaccgggtgtgcctcaagttgccgtctttgatacagcgttccaccagaagatgccggagaaagcctatttgtacgcaatcccctatgagtactacgagaaatataaaattcgccgctatgggtttcatggaacctcacatcgttatgtgagtaaacgtgctgcggaaattatgggcaaaccgctggatcagctcaagatcattaccgttcacgtgggtaacggcgcatcagttgcggcggtgaagaatggcgtatctgttgacacttccatgggtttcacaccacttgaaggtcttgtcatgggcacgcgcagcggcgatattgatccggccatcgtggaatttcttgagaaagaagaaggattgtcggccaaagaagtcgtcaacgcgctctggaagaaatctggtgtgtatgggctcaccaaaggctttagtagggacatgcgtgacattgtgctgaaggctattgaaggtgatcctgtatgccgccttgcattagatgtgtattattatcgtggggcgaaatatattggcgcatacgctgcggccatgaacggtgttgacgcgatcgtctttaccgcaggagttggcgaaaatagcccgattatgcgcgaagaaattattgagaactacttgggctacttagggatcaagatcgataaagaagccaatgacttcaaaggtgaggagaagatcatttcaacgcccgattccaaagtgattgcgatggtagttccgaccaacgaggagctcatgatcgccaaagacacgaaagaaatcattgagaaagggttggacgagcttaagatc

SEQ ID NO: 1354 - protein, 417 aa, synthetic construct
  REGION 1..417: note = variant of acetate kinase from Marinitoga sp.38H-ov
MHHHHHHGGSGMKVLVINSGSSSIKYQLLDMRNEKVLAKGLVERIGIDGSRIVLKVNGEGHVLEHEIKNHEIGLKLVLDLLTDEKYGPLKDLKEIDAVGHRVVHGGERFASSVKITDEVLKTIETLSFLAPLHNPANIMGIKSSMKVLPGVPQVAVFDTAFHQKMPEKAYLYAIPYEYYEKYKIRRYGFHGTSHRYVSKRAAEIMGKPLDQLKIITVHVGNGASVAAVKNGVSVDTSMGFTPLEGLVMGTRSGDIDPAIVEFLEKEEGLSAKEVVNALWKKSGVYGLTKGFSRDMRDIVLKAIEGDPVCRLALDVYYYRGAKYIGAYAAAMNGVDAIVFTAGVGENSPIMREEIIENYLGYLGIKIDKEANDFKGEEKIISTPDSKVIAMVVPTNEELMIAKDTKEIIEKGLDELKI

SEQ ID NO: 1355 - DNA, 1251 bp, synthetic construct
  misc_feature 1..1251: note = variant of acetate kinase from Marinitoga sp.38H-ov
  source 1..1251: mol_type = other DNA
atgcaccatcatcatcatcatggcggtagcggcatgaaagttctggtgattaattctggtagctcctccatcaaatatcagctcctcgatatgcgcaacgaaaaggtattagcgaaaggcttggtcgaacgcattggcatcgacggttcgcgtatcgtgcttaaagttaacggcgaagggcacgtgctggaacatgagattaaaaatcacgaaattggacttaaattggtcctggatcttcttacggacgaaaaatacggtccgttgaaggatctcaaagaaatcgatgcagttgggcatcgcgtagtacatggcggcgagcgttttgccagtagcgtgaagattactgacgaagtcttaaagaccatcgagacgttgtcgttcttagctccgttacacaatccagcgaacattatgggtatcaagagcagcatgaaagtgttaccgggtgtgcctcaagttgccgtctttgatacagcgttccaccagaagatgccggagaaagcctatttgtacgcaatcccctatgagtactacgagaaatataaaattcgccgctatgggtttcatggaacctcacatcgttatgtgagtaaacgtgctgcggaaattatgggcaaaccgctggatcagctcaagatcattaccgttcacgtgggtaacggcgcatcagttgcggcggtgaagaatggcgtatctgttgacacttccatgggtttcacaccacttgaaggtcttgtcatgggcacgcgcagcggcgatattgatccggccatcgtggaatttcttgagaaagaagaaggattgtcggccaaagaagtcgtcaacgcgctctggaagaaatctggtgtgtatgggctcaccaaaggctttagtagggacatgcgtgacattgtgctgaaggctattgaaggtgatcctgtatgccgccttgcattagatgtgtattattatcgtatcgcgaaatatattggcgcatacgctgcggccatgaacggtgttgacgcgatcgtctttaccgcaggagttggcgaaaatgggccgattatgcgcgaagaaattattgagaactacttgggctacttagggatcaagatcgataaagaagccaatgacttcaaaggtgaggagaagatcatttcaacgcccgattccaaagtgattgcgatggtagttccgaccaacgaggagctcatgatcgccaaagacacgaaagaaatcattgagaaagggttggacgagcttaagatc

SEQ ID NO: 1356 - protein, 417 aa, synthetic construct
  REGION 1..417: note = variant of acetate kinase from Marinitoga sp.38H-ov
MHHHHHHGGSGMKVLVINSGSSSIKYQLLDMRNEKVLAKGLVERIGIDGSRIVLKVNGEGHVLEHEIKNHEIGLKLVLDLLTDEKYGPLKDLKEIDAVGHRVVHGGERFASSVKITDEVLKTIETLSFLAPLHNPANIMGIKSSMKVLPGVPQVAVFDTAFHQKMPEKAYLYAIPYEYYEKYKIRRYGFHGTSHRYVSKRAAEIMGKPLDQLKIITVHVGNGASVAAVKNGVSVDTSMGFTPLEGLVMGTRSGDIDPAIVEFLEKEEGLSAKEVVNALWKKSGVYGLTKGFSRDMRDIVLKAIEGDPVCRLALDVYYYRIAKYIGAYAAAMNGVDAIVFTAGVGENGPIMREEIIENYLGYLGIKIDKEANDFKGEEKIISTPDSKVIAMVVPTNEELMIAKDTKEIIEKGLDELKI

SEQ ID NO: 1357 - DNA, 1251 bp, synthetic construct
  misc_feature 1..1251: note = variant of acetate kinase from Marinitoga sp.38H-ov
  source 1..1251: mol_type = other DNA
atgcaccatcatcatcatcatggcggtagcggcatgaaagttctggtgattaattctggtagctcctccatcaaatatcagctcctcgatatgcgcaacgaaaaggtattagcgaaaggcttggtcgaacgcattggcatcgacggttcgcgtatcgtgcttaaagttaacggcgaagggcacgtgctggaacatgagattaaaaatcacgaaattggacttaaattggtcctggatcttcttacggacgaaaaatacggtccgttgaaggatctcaaagaaatcgatgcagttgggcatcgcgtagtacatggcggcgagcgttttgccagtagcgtgaagattactgacgaagtcttaaagaccatcgagacgttgtcgttcttagctccgttacacaatccagcgaacattatgggtatcaagagcagcatgaaagtgttaccgggtgtgcctcaagttgccgtctttgatacagcgttccaccagaagatgccggagaaagcctatttgtacgcaatcccctatgagtactacgagaaatataaaattcgccgctatgggtttcatggaacctcacatcgttatgtgagtaaacgtgctgcggaaattatgggcaaaccgctggatcagctcaagatcattaccgttcacgtgggtaacggcgcatcagttgcggcggtgaagaatggcgtatctgttgacacttccatgggtttcacaccacttgaaggtcttgtcatgggcacgcgcagcggcgatattgatccggccatcgtggaatttcttgagaaagaagaaggattgtcggccaaagaagtcgtcaacgcgctctggaagaaatctggtgtgtatgggctcaccaaaggctttagtagggacatgcgtgacattgtgctgaaggctattgaaggtgatcctgtatgccgccttgcattagatgtggagtattatcgtatcgcgaaatatattggcgcatacgctgcggccatgaacggtgttgacgcgatcgtctttaccgcaggagttggcgaaaatagcccgattatgcgcgaagaaattattgagaactacttgggctacttagggatcaagatcgataaagaagccaatgacttcaaaggtgaggagaagatcatttcaacgcccgattccaaagtgattgcgatggtagttccgaccaacgaggagctcatgatcgccaaagacacgaaagaaatcattgagaaagggttggacgagcttaagatc

SEQ ID NO: 1358 - protein, 417 aa, synthetic construct
  REGION 1..417: note = variant of acetate kinase from Marinitoga sp.38H-ov
MHHHHHHGGSGMKVLVINSGSSSIKYQLLDMRNEKVLAKGLVERIGIDGSRIVLKVNGEGHVLEHEIKNHEIGLKLVLDLLTDEKYGPLKDLKEIDAVGHRVVHGGERFASSVKITDEVLKTIETLSFLAPLHNPANIMGIKSSMKVLPGVPQVAVFDTAFHQKMPEKAYLYAIPYEYYEKYKIRRYGFHGTSHRYVSKRAAEIMGKPLDQLKIITVHVGNGASVAAVKNGVSVDTSMGFTPLEGLVMGTRSGDIDPAIVEFLEKEEGLSAKEVVNALWKKSGVYGLTKGFSRDMRDIVLKAIEGDPVCRLALDVEYYRIAKYIGAYAAAMNGVDAIVFTAGVGENSPIMREEIIENYLGYLGIKIDKEANDFKGEEKIISTPDSKVIAMVVPTNEELMIAKDTKEIIEKGLDELKI

SEQ ID NO: 1359 - DNA, 1251 bp, synthetic construct
  misc_feature 1..1251: note = variant of acetate kinase from Marinitoga sp.38H-ov
  source 1..1251: mol_type = other DNA
atgcaccatcatcatcatcatggcggtagcggcatgaaagttctggtgattaattctggtagctcctccatcaaatatcagctcctcgatatgcgcaacgaaaaggtattagcgaaaggcttggtcgaacgcattggcatcgacggttcgcgtatcgtgcttaaagttaacggcgaagggcacgtgctggaacatgagattaaaaatcacgaaattggacttaaattggtcctggatcttcttacggacgaaaaatacggtccgttgaaggatctcaaagaaatcgatgcagttgggcatcgcgtagtacatggcggcctgcgttttgccagtagcgtgaagattactgacgaagtcttaaagaccatcgagacgttgtcgttcttagctccgttacacaatccagcgaacattatgggtatcaagagcagcatgaaagtgttaccgggtgtgcctcaagttgccgtctttgatacagcgttccaccagaagatgccggagaaagcctatttgtacgcaatcccctatgagtactacgagaaatataaaattcgccgctatgggtttcatggaacctcacatcgttatgtgagtaaacgtgctgcggaaattatgggcaaaccgctggatcagctcaagatcattaccgttcacgtgggtaacggcgcatcagttgcggcggtgaagaatggcgtatctgttgacacttccatgggtttcacaccacttgaaggtcttgtcatgggcacgcgcagcggcgatattgatccggccatcgtggaatttcttgagaaagaagaaggattgtcggccaaagaagtcgtcaacgcgctctggaagaaatctggtgtgtatgggctcaccaaaggctttagtagggacatgcgtgacattgtgctgaaggctattgaaggtgatcctgtatgccgccttgcattagatgtgtattattatcgtatcgcgaaatatattggcgcatacgctgcggccatgaacggtgttgacgcgatcgtctttaccgcaggagttggcgaaaatagcccgattatgcgcgaagaaattattgagaactacttgggctacttagggatcaagatcgataaagaagccaatgacttcaaaggtgaggagaagatcatttcaacgcccgattccaaagtgattgcgatggtagttccgaccaacgaggagctcatgatcgccaaagacacgaaagaaatcattgagaaagggttggacgagcttaagatc

SEQ ID NO: 1360 - protein, 417 aa, synthetic construct
  REGION 1..417: note = variant of acetate kinase from Marinitoga sp.38H-ov
MHHHHHHGGSGMKVLVINSGSSSIKYQLLDMRNEKVLAKGLVERIGIDGSRIVLKVNGEGHVLEHEIKNHEIGLKLVLDLLTDEKYGPLKDLKEIDAVGHRVVHGGLRFASSVKITDEVLKTIETLSFLAPLHNPANIMGIKSSMKVLPGVPQVAVFDTAFHQKMPEKAYLYAIPYEYYEKYKIRRYGFHGTSHRYVSKRAAEIMGKPLDQLKIITVHVGNGASVAAVKNGVSVDTSMGFTPLEGLVMGTRSGDIDPAIVEFLEKEEGLSAKEVVNALWKKSGVYGLTKGFSRDMRDIVLKAIEGDPVCRLALDVYYYRIAKYIGAYAAAMNGVDAIVFTAGVGENSPIMREEIIENYLGYLGIKIDKEANDFKGEEKIISTPDSKVIAMVVPTNEELMIAKDTKEIIEKGLDELKI

SEQ ID NO: 1361 - DNA, 1251 bp, synthetic construct
  misc_feature 1..1251: note = variant of acetate kinase from Marinitoga sp.38H-ov
  source 1..1251: mol_type = other DNA
atgcaccatcatcatcatcatggcggtagcggcatgaaagttctggtgattaattctggtagctcctccatcaaatatcagctcctcgatatgcgcaacgaaaaggtattagcgaaaggcttggtcgaacgcattggcatcgacggttcgcgtatcgtgcttaaagttaacggcgaagggcacgtgctggaacatgagattaaaaatcacgaaattggacttaaattggtcctggatcttcttacggacgaaaaatacggtccgttgaaggatctcaaagaaatcgatgcagttgggcatcgcgtagtacatggcggcgagcgttttgccagtagcgtgaagattactgacgaagtcttaaagaccatcgagacgttgtcgttcttagctccgttacacaatccagcgaacattatgggtatcaagagcagcatgaaagtgttaccgggtgtgcctcaagttgccgtctttgatacagcgttccaccagaagatgccggagaaagcctatttgtacgcaatcccctatgagtactacgagaaatataaaattcgccgctatgggtttcatggaacctcacatcgttatgtgagtaaacgtgctgcggaaattatgggcaaaccgctggatcagctcaagatcattaccgttcacgtgggtaacggcgcatcagttgcggcggtgaagaatggcgtatctgttgacacttccatgggtttcacaccacttgaaggtcttgtcatgggcacgcgcagcggcgatattgatccggccatcgtggaatttcttgagaaagaagaaggattgtcggccaaagaagtcgtcaacgcgctctggaagaaatctggtgtgtatgggctcaccaaaggctttagtagggacatgcgtgacattgtgctgaaggctattgaaggtgatcctgtatgccgccttgcattagatgtgtattattatcgtatcgcgaaatatattggcgcatacgctgcggccatgaacggtgttgacgcgatcgtctttaccgcaggagttggcgaaaatagccatattatgcgcgaagaaattattgagaactacttgggctacttagggatcaagatcgataaagaagccaatgacttcaaaggtgaggagaagatcatttcaacgcccgattccaaagtgattgcgatggtagttccgaccaacgaggagctcatgatcgccaaagacacgaaagaaatcattgagaaagggttggacgagcttaagatc

SEQ ID NO: 1362 - protein, 417 aa, synthetic construct
  REGION 1..417: note = variant of acetate kinase from Marinitoga sp.38H-ov
MHHHHHHGGSGMKVLVINSGSSSIKYQLLDMRNEKVLAKGLVERIGIDGSRIVLKVNGEGHVLEHEIKNHEIGLKLVLDLLTDEKYGPLKDLKEIDAVGHRVVHGGERFASSVKITDEVLKTIETLSFLAPLHNPANIMGIKSSMKVLPGVPQVAVFDTAFHQKMPEKAYLYAIPYEYYEKYKIRRYGFHGTSHRYVSKRAAEIMGKPLDQLKIITVHVGNGASVAAVKNGVSVDTSMGFTPLEGLVMGTRSGDIDPAIVEFLEKEEGLSAKEVVNALWKKSGVYGLTKGFSRDMRDIVLKAIEGDPVCRLALDVYYYRIAKYIGAYAAAMNGVDAIVFTAGVGENSHIMREEIIENYLGYLGIKIDKEANDFKGEEKIISTPDSKVIAMVVPTNEELMIAKDTKEIIEKGLDELKI

SEQ ID NO: 1363 - DNA, 1251 bp, synthetic construct
  misc_feature 1..1251: note = variant of acetate kinase from Marinitoga sp.38H-ov
  source 1..1251: mol_type = other DNA
atgcaccatcatcatcatcatggcggtagcggcatgaaagttctggtgattaattctggtagctcctccatcaaatatcagctcctcgatatgcgcaacgaaaaggtattagcgaaaggcttggtcgaacgcattggcatcgacggttcgcgtatcgtgcttaaagttaacggcgaagggcacgtgctggaacatgagattaaaaatcacgaaattggacttaaattggtcctggatcttcttacggacgaaaaatacggtccgttgaaggatctcaaagaaatcgatgcagttgggcatcgcgtagtacatggcggcgagcgttttgccagtagcgtgaagattactgacgaagtcttaaagaccatcgagacgttgtcgttcttagctccgttacacaatccagcgaacattatgggtatcaagagcagcatgaaagtgttaccgggtgtgcctcaagttgccgtctttgatacagcgttccaccagaagatgccggagaaagcctatttgtacgcaatcccctatgagtactacgagaaatataaaattcgccgctatgggtttcatggaacctcacatcgttatgtgagtaaacgtgctgcggaaattatgggcaaaccgctggatcagctcaagatcattaccgttcacgtgggtaacggcgcatcagttgcggcggtgaagaatggcgtatctgttgacacttccatgggtttcacaccacttgaaggtcttgtcatgggcacgcgcagcggcgatattgatccggccatcgtggaatttcttgagaaagaagaaggattgtcggccaaagaagtcgtcaacgcgctctggaagaaatctggtgtgtatgggctcaccaaaggctttagtagggacatgcgtgacattgtgctgaaggctattgaaggtgatcctgtatgccgcgtggcattagatgtgtattattatcgtatcgcgaaatatattggcgcatacgctgcggccatgaacggtgttgacgcgatcgtctttaccgcaggagttggcgaaaatagcccgattatgcgcgaagaaattattgagaactacttgggctacttagggatcaagatcgataaagaagccaatgacttcaaaggtgaggagaagatcatttcaacgcccgattccaaagtgattgcgatggtagttccgaccaacgaggagctcatgatcgccaaagacacgaaagaaatcattgagaaagggttggacgagcttaagatc

SEQ ID NO: 1364 - protein, 417 aa, synthetic construct
  REGION 1..417: note = variant of acetate kinase from Marinitoga sp.38H-ov
MHHHHHHGGSGMKVLVINSGSSSIKYQLLDMRNEKVLAKGLVERIGIDGSRIVLKVNGEGHVLEHEIKNHEIGLKLVLDLLTDEKYGPLKDLKEIDAVGHRVVHGGERFASSVKITDEVLKTIETLSFLAPLHNPANIMGIKSSMKVLPGVPQVAVFDTAFHQKMPEKAYLYAIPYEYYEKYKIRRYGFHGTSHRYVSKRAAEIMGKPLDQLKIITVHVGNGASVAAVKNGVSVDTSMGFTPLEGLVMGTRSGDIDPAIVEFLEKEEGLSAKEVVNALWKKSGVYGLTKGFSRDMRDIVLKAIEGDPVCRVALDVYYYRIAKYIGAYAAAMNGVDAIVFTAGVGENSPIMREEIIENYLGYLGIKIDKEANDFKGEEKIISTPDSKVIAMVVPTNEELMIAKDTKEIIEKGLDELKI

SEQ ID NO: 1365 - DNA, 1251 bp, synthetic construct
  misc_feature 1..1251: note = variant of acetate kinase from Marinitoga sp.38H-ov
  source 1..1251: mol_type = other DNA
atgcaccatcatcatcatcatggcggtagcggcatgaaagttctggtgattaattctggtagctcctccatcaaatatcagctcctcgatatgcgcaacgaaaaggtattagcgaaaggcttggtcgaacgcattggcatcgacggttcgcgtatcgtgcttaaagttaacggcgaagggcacgtgctggaacatgagattaaaaatcacgaaattggacttaaattggtcctggatcttcttacggacgaaaaatacggtccgttgaaggatctcaaagaaatcgatgcagttgggcatcgcgtagtacatggcggcgagcgttttgccagtagcgtgaagattactgacgaagtcttaaagaccatcgagacgttgtcgttcttagctccgttacacaatccagcgaacattatgggtatcaagagcagcatgaaagtgttaccgggtgtgcctcaagttgccgtctttgatacagcgttccaccagaagatgccggagaaagcctatttgtacgcaatcccctatgagtactacgagaaatataaaattcgccgctatgggtttcatggaacctcacatcgttatgtgagtaaacgtgctgcggaaattatgggcaaaccgctggatcagctcaagatcattaccgttcacgtgggtaacggcgcatcagttgcggcggtgaagaatggcgtatctgttgacacttccatgggtttcacaccacttgaaggtcttgtcatgggcacgcgcagcggcgatattgatccggccatcgtggaatttcttgagaaagaagaaggattgtcggccaaagaagtcgtcaacgcgctctggaagaaatctggtgtgtatgggctcaccaaaggctttagtagggacatgcgtgacattgtgctgaaggctattgaaggtgatcctgtatgccgccttgcattagatgtgtattattatcgtatcgcgaaatatattggcgcatacgctgcggccatgaacggtgttgacgcgatcgtcgtgaccgcaggagttggcgaaaatagcccgattatgcgcgaagaaattattgagaactacttgggctacttagggatcaagatcgataaagaagccaatgacttcaaaggtgaggagaagatcatttcaacgcccgattccaaagtgattgcgatggtagttccgaccaacgaggagctcatgatcgccaaagacacgaaagaaatcattgagaaagggttggacgagcttaagatc

SEQ ID NO: 1366 - protein, 417 aa, synthetic construct
  REGION 1..417: note = variant of acetate kinase from Marinitoga sp.38H-ov
MHHHHHHGGSGMKVLVINSGSSSIKYQLLDMRNEKVLAKGLVERIGIDGSRIVLKVNGEGHVLEHEIKNHEIGLKLVLDLLTDEKYGPLKDLKEIDAVGHRVVHGGERFASSVKITDEVLKTIETLSFLAPLHNPANIMGIKSSMKVLPGVPQVAVFDTAFHQKMPEKAYLYAIPYEYYEKYKIRRYGFHGTSHRYVSKRAAEIMGKPLDQLKIITVHVGNGASVAAVKNGVSVDTSMGFTPLEGLVMGTRSGDIDPAIVEFLEKEEGLSAKEVVNALWKKSGVYGLTKGFSRDMRDIVLKAIEGDPVCRLALDVYYYRIAKYIGAYAAAMNGVDAIVVTAGVGENSPIMREEIIENYLGYLGIKIDKEANDFKGEEKIISTPDSKVIAMVVPTNEELMIAKDTKEIIEKGLDELKI

SEQ ID NO: 1367 - DNA, 1251 bp, synthetic construct
  misc_feature 1..1251: note = variant of acetate kinase from Marinitoga sp.38H-ov
  source 1..1251: mol_type = other DNA
atgcaccatcatcatcatcatggcggtagcggcatgaaagttctggtgattaattctggtagctcctccatcaaatatcagctcctcgatatgcgcaacgaaaaggtattagcgaaaggcttggtcgaacgcattggcatcgacggttcgcgtatcgtgcttaaagttaacggcgaagggcacgtgctggaacatgagattaaaaatcacgaaattggacttaaattggtcctggatcttcttacggacgaaaaatacggtccgttgaaggatctcaaagaaatcgatgcagttgggcatcgcgtagtacatggcggcgagcgttttgccagtagcgtgaagattactgacgaagtcttaaagaccatcgagacgttgtcgttcttagctccgttacacaatccagcgaacattatgggtatcaagagcagcatgaaagtgttaccgggtgtgcctcaagttgccgtctttgatacagcgttccaccagaagatgccggagaaagcctatttgtacgcaatcccctatgagtactacgagaaatataaaattcgccgctatgggtttcatggaacctcacatcgttatgtgagtaaacgtgctgcggaaattatgggcaaaccgctggatcagctcaagatcattaccgttcacgtgggtaacggcgcatcagttgcggcggtgaagaatggcgtatctgttgacacttccatgggtttcacaccacttgaaggtcttgtcatgggcacgcgcagcggcgatattgatccggccatcgtggaatttcttgagaaagaagaaggattgtcggccaaagaagtcgtcaacgcgctctggaagaaatctggtgtgtatgggctcaccaaaggctttagtagggacatgcgtgacattgtgctgaaggctattgaaggtgatcctgtatgccgccttgcattagatgtgtatgcttatcgtatcgcgaaatatattggcgcatacgctgcggccatgaacggtgttgacgcgatcgtctttaccgcaggagttggcgaaaatagcccgattatgcgcgaagaaattattgagaactacttgggctacttagggatcaagatcgataaagaagccaatgacttcaaaggtgaggagaagatcatttcaacgcccgattccaaagtgattgcgatggtagttccgaccaacgaggagctcatgatcgccaaagacacgaaagaaatcattgagaaagggttggacgagcttaagatc

SEQ ID NO: 1368 - protein, 417 aa, synthetic construct
  REGION 1..417: note = variant of acetate kinase from Marinitoga sp.38H-ov
MHHHHHHGGSGMKVLVINSGSSSIKYQLLDMRNEKVLAKGLVERIGIDGSRIVLKVNGEGHVLEHEIKNHEIGLKLVLDLLTDEKYGPLKDLKEIDAVGHRVVHGGERFASSVKITDEVLKTIETLSFLAPLHNPANIMGIKSSMKVLPGVPQVAVFDTAFHQKMPEKAYLYAIPYEYYEKYKIRRYGFHGTSHRYVSKRAAEIMGKPLDQLKIITVHVGNGASVAAVKNGVSVDTSMGFTPLEGLVMGTRSGDIDPAIVEFLEKEEGLSAKEVVNALWKKSGVYGLTKGFSRDMRDIVLKAIEGDPVCRLALDVYAYRIAKYIGAYAAAMNGVDAIVFTAGVGENSPIMREEIIENYLGYLGIKIDKEANDFKGEEKIISTPDSKVIAMVVPTNEELMIAKDTKEIIEKGLDELKI

SEQ ID NO: 1369 - DNA, 1251 bp, synthetic construct
  misc_feature 1..1251: note = variant of acetate kinase from Marinitoga sp.38H-ov
  source 1..1251: mol_type = other DNA
atgcaccatcatcatcatcatggcggtagcggcatgaaagttctggtgattaattctggtagctactccatcaaatatcagctcctcgatatgcgcaacgaaaaggtattagcgaaaggcttggtcgaacgcattggcatcgacggttcgcgtatcgtgcttaaagttaacggcgaagggcacgtgctggaacatgagattaaaaatcacgaaattggacttaaattggtcctggatcttcttacggacgaaaaatacggtccgttgaaggatctcaaagaaatcgatgcagttgggcatcgggtagtacatggcggcgagcgttttgccagtagcgtgaagattactgacgaagtcttaaagaccatcgagacgttgtcgttcttagctccgttacacaatccagcgaacattatgggtatcaagagcagcatgaaagtgttaccgggtgtgcctcaagttgccgtctttgatacagcgttccaccagaagatgccggagaaagcctatttgtacgcaatcccctatgagtactacgagaaatataaaattcgccgctatgggtttcatggaacctcacatcgttatgtgagtaaacgtgctgcggaaattatgggcaaaccgctggatcagctcaagatcattaccgttcacgtgggtaacggcgcatcagttgcggcggtgaagaatggcgtatctgttgacacttccatgggtttcacaccacttgaaggtcttgtcatgggcacgcgcagcggcgatattgatccggccatcgtggaatttcttgagaaagaagaaggattgtcggccaaagaagtcgtcaacgcgctctggaagaaatctggtgtgtatgggctcaccaaaggctttagtagggacatgcgtgacattgtgctgaaggctattgaaggtgatcctgtatgccgccttgcattagatgtgtattattatcgtatcgcgaaatatattggcgcatacgctgcggccatgaacggtgttgacgcgatcgtctttaccgcaggagttggcgaaaatagcccgattatgcgcgaagaaattattgagaactacttgggctacttagggatcaagatcgataaagaagccaatgacttcaaaggtgaggagaagatcatttcaacgcccgattccaaagtgattgcgatggtagttccgaccaacgaggagctcatgatcgccaaagacacgaaagaaatcattgagaaagggttggacgagcttaagatc

SEQ ID NO: 1370 - protein, 417 aa, synthetic construct
  REGION 1..417: note = variant of acetate kinase from Marinitoga sp.38H-ov
MHHHHHHGGSGMKVLVINSGSYSIKYQLLDMRNEKVLAKGLVERIGIDGSRIVLKVNGEGHVLEHEIKNHEIGLKLVLDLLTDEKYGPLKDLKEIDAVGHRVVHGGERFASSVKITDEVLKTIETLSFLAPLHNPANIMGIKSSMKVLPGVPQVAVFDTAFHQKMPEKAYLYAIPYEYYEKYKIRRYGFHGTSHRYVSKRAAEIMGKPLDQLKIITVHVGNGASVAAVKNGVSVDTSMGFTPLEGLVMGTRSGDIDPAIVEFLEKEEGLSAKEVVNALWKKSGVYGLTKGFSRDMRDIVLKAIEGDPVCRLALDVYYYRIAKYIGAYAAAMNGVDAIVFTAGVGENSPIMREEIIENYLGYLGIKIDKEANDFKGEEKIISTPDSKVIAMVVPTNEELMIAKDTKEIIEKGLDELKI

SEQ ID NO: 1371 - DNA, 1251 bp, synthetic construct
  misc_feature 1..1251: note = variant of acetate kinase from Marinitoga sp.38H-ov
  source 1..1251: mol_type = other DNA
atgcaccatcatcatcatcatggcggtagcggcatgaaagttctggtgattaattctggtagctcctccatcaaatatcagctcctcgatatgcgcaacgaaaaggtattagcgaaaggcttggtcgaacgcattggcatcgacggttcgcgtatcgtgcttaaagttaacggcgaagggcacgtgctggaacatgagattaaaaatcacgaaattggacttaaattggtcctggatcttcttacggacgaaaaatacggtccgttgaaggatctcaaagaaatcgatgcagttgggcatcgcgtagtacatggcggcgagcgttttgccagtagcgtgaagattactgacgaagtcttaaagaccatcgagacgttgtcgttcttagctccgttacacaatccagcgaacattatgggtatcaagagcagcatgaaagtgttaccgggtgctcctcaagttgccgtctttgatacagcgttccaccagaagatgccggagaaagcctatttgtacgcaatcccctatgagtactacgagaaatataaaattcgccgctatgggtttcatggaacctcacatcgttatgtgagtaaacgtgctgcggaaattatgggcaaaccgctggatcagctcaagatcattaccgttcacgtgggtaacggcgcatcagttgcggcggtgaagaatggcgtatctgttgacacttccatgggtttcacaccacttgaaggtcttgtcatgggcacgcgcagcggcgatattgatccggccatcgtggaatttcttgagaaagaagaaggattgtcggccaaagaagtcgtcaacgcgctctggaagaaatctggtgtgtatgggctcaccaaaggctttagtagggacatgcgtgacattgtgctgaaggctattgaaggtgatcctgtatgccgccttgcattagatgtgtattattatcgtatcgcgaaatatattggcgcatacgctgcggccatgaacggtgttgacgcgatcgtctttaccgcaggagttggcgaaaatagcccgattatgcgcgaagaaattattgagaactacttgggctacttagggatcaagatcgataaagaagccaatgacttcaaaggtgaggagaagatcatttcaacgcccgattccaaagtgattgcgatggtagttccgaccaacgaggagctcatgatcgccaaagacacgaaagaaatcattgagaaagggttggacgagcttaagatc

SEQ ID NO: 1372 - protein, 417 aa, synthetic construct
  REGION 1..417: note = variant of acetate kinase from Marinitoga sp.38H-ov
MHHHHHHGGSGMKVLVINSGSSSIKYQLLDMRNEKVLAKGLVERIGIDGSRIVLKVNGEGHVLEHEIKNHEIGLKLVLDLLTDEKYGPLKDLKEIDAVGHRVVHGGERFASSVKITDEVLKTIETLSFLAPLHNPANIMGIKSSMKVLPGAPQVAVFDTAFHQKMPEKAYLYAIPYEYYEKYKIRRYGFHGTSHRYVSKRAAEIMGKPLDQLKIITVHVGNGASVAAVKNGVSVDTSMGFTPLEGLVMGTRSGDIDPAIVEFLEKEEGLSAKEVVNALWKKSGVYGLTKGFSRDMRDIVLKAIEGDPVCRLALDVYYYRIAKYIGAYAAAMNGVDAIVFTAGVGENSPIMREEIIENYLGYLGIKIDKEANDFKGEEKIISTPDSKVIAMVVPTNEELMIAKDTKEIIEKGLDELKI

SEQ ID NO: 1373 - DNA, 1251 bp, synthetic construct
  misc_feature 1..1251: note = variant of acetate kinase from Marinitoga sp.38H-ov
  source 1..1251: mol_type = other DNA
atgcaccatcatcatcatcatggcggtagcggcatgaaagttctggtgattaattctggtagctcctccatcaaatatcagctcctcgatatgcgcaacgaaaaggtattagcgaaaggcttggtcgaacgcattggcatcgacggttcgcgtatcgtgcttaaagttaacggcgaagggcacgtgctggaacatgagattaaaaatcacgaaattggacttaaattggtcctggatcttcttacggacgaaaaatacggtccgttgaaggatctcaaagaaatcgatgcagttgggcatcgcgtagtacatggcggcgagcgttttgccagtagcgtgaagattactgacgaagtcttaaagaccatcgagacgttgtcgttcttagctccgttacacaatccagcgaacgttatgggtatcaagagcagcatgaaagtgttaccgggtgtgcctcaagttgccgtctttgatacagcgttccaccagaagatgccggagaaagcctatttgtacgcaatcccctatgagtactacgagaaatataaaattcgccgctatgggtttcatggaacctcacatcgttatgtgagtaaacgtgctgcggaaattatgggcaaaccgctggatcagctcaagatcattaccgttcacgtgggtaacggcgcatcagttgcggcggtgaagaatggcgtatctgttgacacttccatgggtttcacaccacttgaaggtcttgtcatgggcacgcgcagcggcgatattgatccggccatcgtggaatttcttgagaaagaagaaggattgtcggccaaagaagtcgtcaacgcgctctggaagaaatctggtgtgtatgggctcaccaaaggctttagtagggacatgcgtgacattgtgctgaaggctattgaaggtgatcctgtatgccgccttgcattagatgtgtattattatcgtatcgcgaaatatattggcgcatacgctgcggccatgaacggtgttgacgcgatcgtctttaccgcaggagttggcgaaaatagcccgattatgcgcgaagaaattattgagaactacttgggctacttagggatcaagatcgataaagaagccaatgacttcaaaggtgaggagaagatcatttcaacgcccgattccaaagtgattgcgatggtagttccgaccaacgaggagctcatgatcgccaaagacacgaaagaaatcattgagaaagggttggacgagcttaagatc

SEQ ID NO: 1374 - protein, 417 aa, synthetic construct
  REGION 1..417: note = variant of acetate kinase from Marinitoga sp.38H-ov
MHHHHHHGGSGMKVLVINSGSSSIKYQLLDMRNEKVLAKGLVERIGIDGSRIVLKVNGEGHVLEHEIKNHEIGLKLVLDLLTDEKYGPLKDLKEIDAVGHRVVHGGERFASSVKITDEVLKTIETLSFLAPLHNPANVMGIKSSMKVLPGVPQVAVFDTAFHQKMPEKAYLYAIPYEYYEKYKIRRYGFHGTSHRYVSKRAAEIMGKPLDQLKIITVHVGNGASVAAVKNGVSVDTSMGFTPLEGLVMGTRSGDIDPAIVEFLEKEEGLSAKEVVNALWKKSGVYGLTKGFSRDMRDIVLKAIEGDPVCRLALDVYYYRIAKYIGAYAAAMNGVDAIVFTAGVGENSPIMREEIIENYLGYLGIKIDKEANDFKGEEKIISTPDSKVIAMVVPTNEELMIAKDTKEIIEKGLDELKI

SEQ ID NO: 1375 - DNA, 1251 bp, synthetic construct
  misc_feature 1..1251: note = variant of acetate kinase from Marinitoga sp.38H-ov
  source 1..1251: mol_type = other DNA
atgcaccatcatcatcatcatggcggtagcggcatgaaagttctggtgattaattctggtagctcctccatcaaatatcagctcctcgatatgcgcaacgaaaaggtattagcgaaaggcttggtcgaacgcattggcatcgacggttcgcgtatcgtgcttaaagttaacggcgaagggcacgtgctggaacatgagattaaaaatcacgaaattggacttaaattggtcctggatcttcttacggacgaaaaatacggtccgttgaaggatctcaaagaaatcgatgcagttgggcatcgcgtagtacatggcggcgagcgttttgccagtagcgtgaagattactgacgaagtcttaaagaccatcgagacgttgtcgttcttagctccgttacacaatccagcgaacattatgggtatcaagagcagcatgaaagtgttaccgggtgtgcctcaagttgccgtctttgatacagcgttccaccagaagatgccggagaaagcctatttgtacgcaatcccctatgagtactacgagaaatataaaattcgccgctatgggtttcatggaacctcacatcgttatgtgagtaaacgtgctgcggaaattatgggcaaaccgctggatcagctcaagatcattaccgttcacgtgggtaacggcgcatcagttgcggcggtgaagaatggcgtatctgttgacacttccatgggtttcacaccacttgaaggtcttgtcatgggcacgcgcagcggcgatattgatccggccatcgtggaatttcttgagaaagaagaaggattgtcggccaaagaagtcgtcaacgcgctctggaagaaatctggtgtgtatgggctcaccaaaggctttagtagggacatgcgtgacattgtgctgaaggctattgaaggtgatcctgtatgccgccttgcattagatgtgtattattatcgtatcgcgaaatatattggcgcatacgctgcggccatgaacggtgttgacgcgatcgtctttaccgcaggagttggcgaaaatagcccgattatgcgcgaagaaattattgagaactacttgggctacttagggatcaagatcgataaagaagccaatgacttcaaaggtgaggagaagatcatttcaacgcccgattccaaagtgattgcgatggtagttccgaccaacgaggagctcatgatcgccaaagacacgaaagaaatgattgagaaagggttggacgagcttaagatc

SEQ ID NO: 1376 - protein, 417 aa, synthetic construct
  REGION 1..417: note = variant of acetate kinase from Marinitoga sp.38H-ov
MHHHHHHGGSGMKVLVINSGSSSIKYQLLDMRNEKVLAKGLVERIGIDGSRIVLKVNGEGHVLEHEIKNHEIGLKLVLDLLTDEKYGPLKDLKEIDAVGHRVVHGGERFASSVKITDEVLKTIETLSFLAPLHNPANIMGIKSSMKVLPGVPQVAVFDTAFHQKMPEKAYLYAIPYEYYEKYKIRRYGFHGTSHRYVSKRAAEIMGKPLDQLKIITVHVGNGASVAAVKNGVSVDTSMGFTPLEGLVMGTRSGDIDPAIVEFLEKEEGLSAKEVVNALWKKSGVYGLTKGFSRDMRDIVLKAIEGDPVCRLALDVYYYRIAKYIGAYAAAMNGVDAIVFTAGVGENSPIMREEIIENYLGYLGIKIDKEANDFKGEEKIISTPDSKVIAMVVPTNEELMIAKDTKEMIEKGLDELKI

SEQ ID NO: 1377 - DNA, 1251 bp, synthetic construct
  misc_feature 1..1251: note = variant of acetate kinase from Marinitoga sp.38H-ov
  source 1..1251: mol_type = other DNA
atgcaccatcatcatcatcatggcggtagcggcatgaaagttctggtgattaattctggtagctcctccatcaaatatcagctcctcgatatgcgcaacgaaaaggtattagcgaaaggcttggtcgaacgcattggcatcgacggttcgcgtatcgtgcttaaagttaacggcgaagggcacgtgctggaacatgagattaaaaatcacgaaattggacttaaattggtcctggatcttcttacggacgaaaaatacggtccgttgaaggatctcaaagaaatcgatgcagttgggcatcgcgtagtacatggcggcgagcgttttgccagtagcgtgaagattactgacgaagtcttaaagaccatcgagacgttgtcgttcttagctccgttacacaatccagcgaacattatgggtatcaagagcagcatgaaagtgttaccgggtgtgcctcaagttgccgtctttgatacagcgttccaccagaagatgccggagaaagcctatttgtacgcaatcccctatgagtactacgagaaatataaaattcgccgctatgggtttcatggaacctcacatcgttatgtgagtaaacgtgctgcggaaattatgggcaaaccgctggatcagctcaagatcattaccgttcacgtgggtaacggcgcatcagttgcggcggtgaagaatggcgtatctgttgacacttccatgggtttcacaccacttgaaggtcttgtcatgggcacgcgcagcggcgatattgatccggccatcgtggaatttcttgagaaagaagaaggattgtcggccaaagaagtcgtcaacgcgctctggaagaaatctggtgtgtatgggctcaccaaaggctttagtagggacatgcgtgacattgtgctgaaggctattgaaggtgatcctgtatgccgccttgcattagatgtgtattattatcgtatcgcgaaatatattggcgcatacgctgcggccatgaacggtgttgacgcgatcgtctttaccgcaggagttggcgaaaatagcccgattatgcgcgaagaaattattgagaactacttgggctacttagggatcaagatcgataaagaagccaatgacttcaaaggtgaggagaagatcatttcaacgcccgattccaaagtgattgcgatggtagttccgaccaacgaggagctcatgatcgccaaagacacgaaagaactgattgagaaagggttggacgagcttaagatc

SEQ ID NO: 1378 - protein, 417 aa, synthetic construct
  REGION 1..417: note = variant of acetate kinase from Marinitoga sp.38H-ov
MHHHHHHGGSGMKVLVINSGSSSIKYQLLDMRNEKVLAKGLVERIGIDGSRIVLKVNGEGHVLEHEIKNHEIGLKLVLDLLTDEKYGPLKDLKEIDAVGHRVVHGGERFASSVKITDEVLKTIETLSFLAPLHNPANIMGIKSSMKVLPGVPQVAVFDTAFHQKMPEKAYLYAIPYEYYEKYKIRRYGFHGTSHRYVSKRAAEIMGKPLDQLKIITVHVGNGASVAAVKNGVSVDTSMGFTPLEGLVMGTRSGDIDPAIVEFLEKEEGLSAKEVVNALWKKSGVYGLTKGFSRDMRDIVLKAIEGDPVCRLALDVYYYRIAKYIGAYAAAMNGVDAIVFTAGVGENSPIMREEIIENYLGYLGIKIDKEANDFKGEEKIISTPDSKVIAMVVPTNEELMIAKDTKELIEKGLDELKI

SEQ ID NO: 1379 - DNA, 1251 bp, synthetic construct
  misc_feature 1..1251: note = variant of acetate kinase from Marinitoga sp.38H-ov
  source 1..1251: mol_type = other DNA
atgcaccatcatcatcatcatggcggtagcggcatgaaagttctggtgattaattctggtagctcctccatcaaatatcagctcctcgatatgcgcaacgaaaaggtattagcgaaaggcttggtcgaacgcattggcatcgacggttcgcgtatcgtgcttaaagttaacggcgaagggcacgtgctggaacatgagattaaaaatcacgaaattggacttaaattggtcctggatcttcttacggacgaaaaatacggtccgttgaaggatctcaaagaaatcgatgcagttgggcatcgcgtagtacatggcggcgagcgttttgccagtagcgtgaagattactgacgaagtcttaaagaccatcgagacgttgtcgttcttagctccgttacacaatccagcgaacattatgggtatcaagagcagcatgaaagtgttaccgggtgtgcctcaagttgccgtctttgatacagcgttccaccagaagatgccggagaaagcctatttgtacgcaatcccctatgagtactacgagaaatataaaattcgccgctatgggtttcatggaacctcacatcgttatgtgagtaaacgtgctgcggaaattatgggcaaaccgctggatcagctcaagatcattaccgttcacgtgggtaacggcgggtcagttgcggcggtgaagaatggcgtatctgttgacacttccatgggtttcacaccacttgaaggtcttgtcatgggcacgcgcagcggcgatattgatccggccatcgtggaatttcttgagaaagaagaaggattgtcggccaaagaagtcgtcaacgcgctctggaagaaatctggtgtgtatgggctcaccaaaggctttagtagggacatgcgtgacattgtgctgaaggctattgaaggtgatcctgtatgccgccttgcattagatgtgtattattatcgtatcgcgaaatatattggcgcatacgctgcggccatgaacggtgttgacgcgatcgtctttaccgcaggagttggcgaaaatagcccgattatgcgcgaagaaattattgagaactacttgggctacttagggatcaagatcgataaagaagccaatgacttcaaaggtgaggagaagatcatttcaacgcccgattccaaagtgattgcgatggtagttccgaccaacgaggagctcatgatcgccaaagacacgaaagaaatcattgagaaagggttggacgagcttaagatc

SEQ ID NO: 1380 - protein, 417 aa, synthetic construct
  REGION 1..417: note = variant of acetate kinase from Marinitoga sp.38H-ov
MHHHHHHGGSGMKVLVINSGSSSIKYQLLDMRNEKVLAKGLVERIGIDGSRIVLKVNGEGHVLEHEIKNHEIGLKLVLDLLTDEKYGPLKDLKEIDAVGHRVVHGGERFASSVKITDEVLKTIETLSFLAPLHNPANIMGIKSSMKVLPGVPQVAVFDTAFHQKMPEKAYLYAIPYEYYEKYKIRRYGFHGTSHRYVSKRAAEIMGKPLDQLKIITVHVGNGGSVAAVKNGVSVDTSMGFTPLEGLVMGTRSGDIDPAIVEFLEKEEGLSAKEVVNALWKKSGVYGLTKGFSRDMRDIVLKAIEGDPVCRLALDVYYYRIAKYIGAYAAAMNGVDAIVFTAGVGENSPIMREEIIENYLGYLGIKIDKEANDFKGEEKIISTPDSKVIAMVVPTNEELMIAKDTKEIIEKGLDELKI

SEQ ID NO: 1381 - DNA, 1251 bp, synthetic construct
  misc_feature 1..1251: note = variant of acetate kinase from Marinitoga sp.38H-ov
  source 1..1251: mol_type = other DNA
atgcaccatcatcatcatcatggcggtagcggcatgaaagttctggtgattaattctggtagctcctccatcaaatatcagctcctcgatatgcgcaacgaaaaggtattagcgaaaggcttggtcgaacgcattggcatcgacggttcgcgtatcgtgcttaaagttaacggcgaagggcacgtgctggaacatgagattaaaaatcacgaaattggacttaaattggtcctggatcttcttacggacgaaaaatacggtccgttgaaggatctcaaagaaatcgatgcagttgggcatcgcgtagtacatggcggcgagcgttttgccagtagcgtgaagattactgacgaagtcttaaagaccatcgagacgttgtcgttcttagctccgttacacaatccagcgaacattatgggtatcaagagcagcatgaaagtgttaccgggtgtgcctcaagttgccgtctttgatacagcgttccaccagaagatgccggagaaagcctatttgtacgcaatcccctatgagtactacgagaaatataaaattcgccgctatgggtttcatggaacctcacatcgttatgtgagtaaacgtgctgcggaaattatgggcaaaccgctggatcagctcaagatcattaccgttcacgtgggtaacggcgcatcagttgcggcggtgaagaatggcgtatctgttgacacttccatgggtttcacaccacttgaaggtcttgtcatgggcacgcgcagcggcgatattgatccggccatcgtggaatttcttgagaaagaagaaggattgtcggccaaagaagtcgtcaacgcgctctggaagaaatctggtgtgtatgggctcaccaaaggctttagtagggacatgcgtgacattgtgctgaaggctattgaaggtgatcctgtatgccgccttgcattagatgtgtattattatcgtatcgcgaaatatattggcgcatacgctgcggccatgaacggtgttgacgcgatcgtctttaccgcaggagttggcgaaaatagcccgattatgcgcgaagaaattattgagaactacttgggctacttagggatcaagatcgataaagaagccaatgacttcaaaggtgaggagaagatcatttcaacgcccgattccaaagtgattgcgatgcctgttccgaccaacgaggagctcatgatcgccaaagacacgaaagaaatcattgagaaagggttggacgagcttaagatc

SEQ ID NO: 1382 - protein, 417 aa, synthetic construct
  REGION 1..417: note = variant of acetate kinase from Marinitoga sp.38H-ov
MHHHHHHGGSGMKVLVINSGSSSIKYQLLDMRNEKVLAKGLVERIGIDGSRIVLKVNGEGHVLEHEIKNHEIGLKLVLDLLTDEKYGPLKDLKEIDAVGHRVVHGGERFASSVKITDEVLKTIETLSFLAPLHNPANIMGIKSSMKVLPGVPQVAVFDTAFHQKMPEKAYLYAIPYEYYEKYKIRRYGFHGTSHRYVSKRAAEIMGKPLDQLKIITVHVGNGASVAAVKNGVSVDTSMGFTPLEGLVMGTRSGDIDPAIVEFLEKEEGLSAKEVVNALWKKSGVYGLTKGFSRDMRDIVLKAIEGDPVCRLALDVYYYRIAKYIGAYAAAMNGVDAIVFTAGVGENSPIMREEIIENYLGYLGIKIDKEANDFKGEEKIISTPDSKVIAMPVPTNEELMIAKDTKEIIEKGLDELKI

SEQ ID NO: 1383 - DNA, 1251 bp, synthetic construct
  misc_feature 1..1251: note = variant of acetate kinase from Marinitoga sp.38H-ov
  source 1..1251: mol_type = other DNA
atgcaccatcatcatcatcatggcggtagcggcatgaaagttctggtgattaattctggtagctcctccatcaaatatcagctcctcgatatgcgcaacgaaaaggtattagcgaaaggcttggtcgaacgcattggcatcgacggttcgcgtatcgtgcttaaagttaacggcgaagggcacgtgctggaacatgagattaaaaatcacgaaattggacttaaattggtcctggatcttcttacggacgaaaaatacggtccgttgaaggatctcaaagaaatcgatgcagttgggcatcgcgtagtacatggcggcgagcgttttgccagtagcgtgaagattactgacgaagtcttaaagaccatcgagacgttgtcgttcttagctccgttacacaatccagcgaacattatgggtatcaagagcagcatgaaagtgttaccgggtgtgcctcaagttgccgtctttgatacagcgttccaccagaagatgccggagaaagcctatttgtacgcaatcccctatgagtactacgagaaatataaaattcgccgctatgggtttcatggaacctcacatcgttatgtgagtaaacgtgctgcggaaattatgggcaaaccgctggatcagctcaagatcattaccgttcacgtgggtaacggcgcatcagttgcggcggtgaagaatggcgtatctgttgacacttccatgggtttcacaccacttgaaggtcttgtcatgggcacgcgcagcggcgatattgatccggccatcgtggaatttcttgagaaagaagaaggattgtcggccaaagaagtcgtcaacgcgctctggaagaaatctggtgtgtatgggctcaccaaaggctttagtagggacatgcgtgacattgtgctgaaggctattgaaggtgatcctgtatgccgccttgcattagatgtgtattattatcgtatcgcgaaatatattggcgcatacgctgcggccatgaacggtgttgacgcgatcgtctttaccgcaggagttggcgaaaatagcccgattatgcgcgaagaaattattgagaactacttgggctacttagggatcaagatcgataaagaagccaatgacttcaaaggtgaggagaagatcatttcaacgcccgattccaaagtgattgcgatggtagttcataccaacgaggagctcatgatcgccaaagacacgaaagaaatcattgagaaagggttggacgagcttaagatc

SEQ ID NO: 1384 - protein, 417 aa, synthetic construct
  REGION 1..417: note = variant of acetate kinase from Marinitoga sp.38H-ov
MHHHHHHGGSGMKVLVINSGSSSIKYQLLDMRNEKVLAKGLVERIGIDGSRIVLKVNGEGHVLEHEIKNHEIGLKLVLDLLTDEKYGPLKDLKEIDAVGHRVVHGGERFASSVKITDEVLKTIETLSFLAPLHNPANIMGIKSSMKVLPGVPQVAVFDTAFHQKMPEKAYLYAIPYEYYEKYKIRRYGFHGTSHRYVSKRAAEIMGKPLDQLKIITVHVGNGASVAAVKNGVSVDTSMGFTPLEGLVMGTRSGDIDPAIVEFLEKEEGLSAKEVVNALWKKSGVYGLTKGFSRDMRDIVLKAIEGDPVCRLALDVYYYRIAKYIGAYAAAMNGVDAIVFTAGVGENSPIMREEIIENYLGYLGIKIDKEANDFKGEEKIISTPDSKVIAMVVHTNEELMIAKDTKEIIEKGLDELKI

SEQ ID NO: 1385 - DNA, 1251 bp, synthetic construct
  misc_feature 1..1251: note = variant of acetate kinase from Marinitoga sp.38H-ov
  source 1..1251: mol_type = other DNA
atgcaccatcatcatcatcatggcggtagcggcatgaaagttctggtgattaattctggtagctcctccatcaaatatcagctcctcgatatgcgcaacgaaaaggtattagcgaaaggcttggtcgaacgcattggcatcgacggttcgcgtatcgtgcttaaagttaacggcgaagggcacgtgctggaacatgagattaaaaatcacgaaattggacttaaattggtcctggatcttcttacggacgaaaaatacggtccgttgaaggatctcaaagaaatcgatgcagttgggcatcgcgtagtacatggcggcgagcgttttgccagtagcgtgaagattactgacgaagtcttaaagaccatcgagacgttgtcgttcttagctccgttacacaatccagcgaacattatgggtatcaagagcagcatgaaagtgttaccgggtgtgcctcaagttgccgtctttgatacagcgttccaccagaagatgccggagaaagcctatttgtacgcaatcccctatgagtactacgagaaatataaaattcgccgctatgggtttcatggaacctcacatcgttatgtgagtaaacgtgctgcggaaattatgggcaaaccgctggatcagctcaagatcattaccgttcacgtgggtaacggcgcatcagttgcggcggtgaagaatggcgtatctgttgacacttccatgggtttcacaccacttgaaggtcttgtcatgggcacgcgcagcggcgatattgatccggccatcgtggaatttcttgagaaagaagaaggattgtcggccaaagaagtcgtcaacgcgctctggaagaaatctggtgtgtatgggctcaccaaaggctttagtagggacatgcgtgacattgtgctgaaggctattgaaggtgatcctgtatgccgccttgcattagatgtgtattattatcgtatcgcgaaatatattggcgcatacgctgcggccatgaacggtgttgacgcgatcgtctttaccgcaggagttggcgaaaatagcccgattatgcgcgaagaaattattgagaactacttgggctacttagggatcaagatcgataaagaagccaatgacttcaaaggtgaggagaagatcatttcaacgcccgattccaaagtgattgcgatggtagttccgaccaacgaggagctcatgatcgccaaagacacgaaagaacgtattgagaaagggttggacgagcttaagatc

SEQ ID NO: 1386 - protein, 417 aa, synthetic construct
  REGION 1..417: note = variant of acetate kinase from Marinitoga sp.38H-ov
MHHHHHHGGSGMKVLVINSGSSSIKYQLLDMRNEKVLAKGLVERIGIDGSRIVLKVNGEGHVLEHEIKNHEIGLKLVLDLLTDEKYGPLKDLKEIDAVGHRVVHGGERFASSVKITDEVLKTIETLSFLAPLHNPANIMGIKSSMKVLPGVPQVAVFDTAFHQKMPEKAYLYAIPYEYYEKYKIRRYGFHGTSHRYVSKRAAEIMGKPLDQLKIITVHVGNGASVAAVKNGVSVDTSMGFTPLEGLVMGTRSGDIDPAIVEFLEKEEGLSAKEVVNALWKKSGVYGLTKGFSRDMRDIVLKAIEGDPVCRLALDVYYYRIAKYIGAYAAAMNGVDAIVFTAGVGENSPIMREEIIENYLGYLGIKIDKEANDFKGEEKIISTPDSKVIAMVVPTNEELMIAKDTKERIEKGLDELKI

SEQ ID NO: 1387 - DNA, 1251 bp, synthetic construct
  misc_feature 1..1251: note = variant of acetate kinase from Marinitoga sp.38H-ov
  source 1..1251: mol_type = other DNA
atgcaccatcatcatcatcatggcggtagcggcatgaaagttctggtgattaattctggtagctcctccatcaaatatcagctcctcgatatgcgcaacgaaaaggtattactgaaaggcttggtcgaacgcattggcatcgacggttcgcgtatcgtgcttaaagttaacggcgaagggcacgtgctggaacatgagattaaaaatcacgaaattggacttaaattggtcctggatcttcttacggacgaaaaatacggtccgttgaaggatctcaaagaaatcgatgcagttgggcatcgcgtagtacatggcggcgagcgttttgccagtagcgtgaagattactgacgaagtcttaaagaccatcgagacgttgtcgttcttagctccgttacacaatccagcgaacattatgggtatcaagagcagcatgaaagtgttaccgggtgtgcctcaagttgccgtctttgatacagcgttccaccagaagatgccggagaaagcctatttgtacgcaatcccctatgagtactacgagaaatataaaattcgccgctatgggtttcatggaacctcacatcgttatgtgagtaaacgtgctgcggaaattatgggcaaaccgctggatcagctcaagatcattaccgttcacgtgggtaacggcgcatcagttgcggcggtgaagaatggcgtatctgttgacacttccatgggtttcacaccacttgaaggtcttgtcatgggcacgcgcagcggcgatattgatccggccatcgtggaatttcttgagaaagaagaaggattgtcggccaaagaagtcgtcaacgcgctctggaagaaatctggtgtgtatgggctcaccaaaggctttagtagggacatgcgtgacattgtgctgaaggctattgaaggtgatcctgtatgccgccttgcattagatgtgtattattatcgtatcgcgaaatatattggcgcatacgctgcggccatgaacggtgttgacgcgatcgtctttaccgcaggagttggcgaaaatagcccgattatgcgcgaagaaattattgagaactacttgggctacttagggatcaagatcgataaagaagccaatgacttcaaaggtgaggagaagatcatttcaacgcccgattccaaagtgattgcgatggtagttccgaccaacgaggagctcatgatcgccaaagacacgaaagaaatcattgagaaagggttggacgagcttaagatc

SEQ ID NO: 1388 - protein, 417 aa, synthetic construct
  REGION 1..417: note = variant of acetate kinase from Marinitoga sp.38H-ov
MHHHHHHGGSGMKVLVINSGSSSIKYQLLDMRNEKVLLKGLVERIGIDGSRIVLKVNGEGHVLEHEIKNHEIGLKLVLDLLTDEKYGPLKDLKEIDAVGHRVVHGGERFASSVKITDEVLKTIETLSFLAPLHNPANIMGIKSSMKVLPGVPQVAVFDTAFHQKMPEKAYLYAIPYEYYEKYKIRRYGFHGTSHRYVSKRAAEIMGKPLDQLKIITVHVGNGASVAAVKNGVSVDTSMGFTPLEGLVMGTRSGDIDPAIVEFLEKEEGLSAKEVVNALWKKSGVYGLTKGFSRDMRDIVLKAIEGDPVCRLALDVYYYRIAKYIGAYAAAMNGVDAIVFTAGVGENSPIMREEIIENYLGYLGIKIDKEANDFKGEEKIISTPDSKVIAMVVPTNEELMIAKDTKEIIEKGLDELKI

SEQ ID NO: 1389 - DNA, 1251 bp, synthetic construct
  misc_feature 1..1251: note = variant of acetate kinase from Marinitoga sp.38H-ov
  source 1..1251: mol_type = other DNA
atgcaccatcatcatcatcatggcggtagcggcatgaaagtgctgagcattaattctggtagctcctccatcaaatatcagctcctcgatatgcgcaacgaaaaggtattactgaaaggcttggtcgaacgcattggcatcgacggttcgcgtatcgtgcttaaagttaacggcgaagggcacgtgctggaacatgagattaaaaatcacgaaattggacttaaattggtcctggatcttcttacggacgaaaaatacggtccgttgaaggatctcaaagaaatcgatgcagttgggcatcgcgtagtacatggcggcgagcgttttgccagtagcgtgaagattactgacgaagtcttaaagaccatcgagacgttgtcgttcttagctccgttacacaatccagcgaacattatgggtatcaagagcagcatgaaagtgttaccgggtgtgcctcaagttgccgtctttgatacagcgttccaccagaagatgccggagaaagcctatttgtacgcaatcccctatgagtactacgagaaatataaaattcgccgctatgggtttcatggaacctcacatcgttatgtgagtaaacgtgctgcggaaattatgggcaaaccgctggatcagctcaagatcattaccgttcacgtgggtaacggcgcatcagttgcggcggtgaagaatggcgtatctgttgacacttccatgggtttcacaccacttgaaggtcttgtcatgggcacgcgcagcggcgatattgatccggccatcgtggaatttcttgagaaagaagaaggattgtcggccaaagaagtcgtcaacgcgctctggaagaaatctggtgtgtatgggctcaccaaaggctttagtagggacatgcgtgacattgtgctgaaggctattgaaggtgatcctgtatgccgccttgcattagatgtgtattattatcgtatcgcgaaatatattggcgcatacgcggcggccatgaacggtgttgacgcgatcgtctttaccgcaggagttggcgaaaatagcccgattatgcgcgaagaaattattgagaactacttgggctacttagggatcaagatcgataaagaagccaatgactttaaaggtgaggagaagatcatttcaacgcccgattccaaagtgattgcgatggtagttccgaccaacgaggagctcatgatcgccaaagacacgaaagaaatcattgagaaagggttggacgagcttaagatc

SEQ ID NO: 1390 - protein, 417 aa, synthetic construct
  REGION 1..417: note = variant of acetate kinase from Marinitoga sp.38H-ov
MHHHHHHGGSGMKVLSINSGSSSIKYQLLDMRNEKVLLKGLVERIGIDGSRIVLKVNGEGHVLEHEIKNHEIGLKLVLDLLTDEKYGPLKDLKEIDAVGHRVVHGGERFASSVKITDEVLKTIETLSFLAPLHNPANIMGIKSSMKVLPGVPQVAVFDTAFHQKMPEKAYLYAIPYEYYEKYKIRRYGFHGTSHRYVSKRAAEIMGKPLDQLKIITVHVGNGASVAAVKNGVSVDTSMGFTPLEGLVMGTRSGDIDPAIVEFLEKEEGLSAKEVVNALWKKSGVYGLTKGFSRDMRDIVLKAIEGDPVCRLALDVYYYRIAKYIGAYAAAMNGVDAIVFTAGVGENSPIMREEIIENYLGYLGIKIDKEANDFKGEEKIISTPDSKVIAMVVPTNEELMIAKDTKEIIEKGLDELKI

SEQ ID NO: 1391 - DNA, 19 bp, synthetic construct
  misc_feature 1..19: note = Modified oligo substrate or product
  modified_base 16: mod_base = OTHER; note = 2'-methoxyguanosine
  modified_base 17: mod_base = OTHER; note = 2'-methoxyadenosine
  modified_base 18: mod_base = OTHER; note = 2'-methoxycytidine
  modified_base 19: mod_base = OTHER; note = 2'-fluoro guanosine
  source 1..19: mol_type = other DNA
tttttttttttttttnnnn

SEQ ID NO: 1392 - DNA, 19 bp, synthetic construct
  misc_feature 1..19: note = Modified oligo substrate or product
  modified_base 1: mod_base = OTHER; note = 2'-deoxythymidine with 6-carboxyfluorescein modification
  modified_base 16: mod_base = OTHER; note = 2'-methoxyguanosine
  modified_base 17: mod_base = OTHER; note = 2'-methoxyadenosine
  modified_base 18: mod_base = OTHER; note = 2'-methoxycytidine
  modified_base 19: mod_base = OTHER; note = 2'-fluoro guanosine
  source 1..19: mol_type = other DNA
nttttttttttttttnnnn
